United States Patent Application Publication US 2007/0060743 A1 - sequence listing, part 5

SEQ ID NO: 9822 - protein, 1005 aa, Homo sapiens
  misc_feature (1)...(1005): Xaa = X or * as defined in Table 2
PVRQFIFPKLPIRHCLEAEVGGRGQTCAPPRKWAVPIGLHSRSATSQSGCGGGRSWLCSSLKMAAQPPRGIRLSALCPKFLHTNSTSHTWGHSVQLLELIGXCLWIPDVNAKQIWGLTKQWINDHICLTFTDNGNGMTSDKLHKMLSFGFSDKVTMNGHVPVGLYGNGFKSGSMRLGKDAIVFTKNGESMSVGLLSQTYLEVIKAEHVVVPIVAFNKHRQMINLAESKASLAAILEHSLFSTEQKLLAELDAIIGKKGTRIIIWNLRSYKNATEFDFEKDKYDIRIPEDLDEITGKKGYKKQERMDQIAPESDYSLRAYCSILYLKPRMQIILRGQKVKTQLVSKSLAYIERDVYRPKFLSKTVRITFGFNCRNKDHYGIMMYHRNRLIKAYEKVGCQLRANNMGVGVVGIIECNFLKPTHNKQDFDYTNEYRLTITALGEKLNDYWNEMKVKKNTEYPLNLPVEDIQKRPDQTWVQCDACLKWRKLPDGMDQLPEKWYCSNNPDPQFRNCEVPEEPEDEDLVHPTYEKTYKKTNKEKFRIRQPEMIPRINAELLFRPTALSTPSFSSPKESVSKRRHLSEGTNSYATRLLNNHQVPPQSEPESNSLKRRLSTRSSILNAKNRRLSSQFENSVYKGDDDDEDVIILEENSTPKPAVDHDIDMKSEQSHVEQGGVQVEFVGDSEPCGQTGSTSTSSSRCDQGNTAATQTEVPSLVVKKEETVEDEIDVRNDAVILPSCVEAEAKIHETQETTDKSADDAGCQLQELRNQLLLVTEEKENYKRQCHMFTDQIKVLQQRILEMNDKYVKKETCHQSTETDAVFLLESINGKSESPDHMVSQYQQALEEIERLKKQCSALQHVKAECSQCSNNESKSEMDEMAVQLDDVFRQLDKCSIERDQYKSEVELLEMEKSQIRSQCEGLKTEVDQLKSTNQQTAPDVSTSSNIEESVNHMDGERLKLRSFRVNVGNLLAMIVPDLDLQQVNYDVDVVDEILGQVVEQMSEISST

SEQ ID NO: 9823 - protein, 197 aa, Homo sapiens
  misc_feature (1)...(197): Xaa = X or * as defined in Table 2
VEMRRNQCKNSSNSNGLCVICPSNNHTSSPTRVLTWMNCLELHKYNVXIWIGKKIIXTQENGKTQSEENKNNIKVLQELKDKVAGIIKKNLTDLNAPKNTLLEFHNAFTSINSRKDKSDERISELEDWVSNIRWTKVNXNEQILHGGWDDIMRPILQITGISEREVEKSNNLENVVQDIIFESFPNLARKANSQIQE

SEQ ID NO: 9824 - protein, 113 aa, Homo sapiens
  misc_feature (1)...(113): Xaa = X or * as defined in Table 2
HGVSLLLPRLECTGHVISAHCDPRLPGFERFSCLSLPSSWDYRHAPTHAQAKFCIFKWRRGFSHVGQAGXHFYFPSQVLGTNMEDFFLTGLILHGLFQEDSNAPYSFKWGSLR

SEQ ID NO: 9825 - protein, 194 aa, Homo sapiens
  misc_feature (1)...(194): Xaa = X or * as defined in Table 2
ACYALNLFPKHTDIFYFFFIYFFCRDRGPRYITQAGLKFVDFKXILPPWPYQSVGIISVSHPPGPHXCILNAINKNYRYRNXLLYIQYPMLFGVFLRQGFAVTSAAVQWYDHGSMQPQLPGLRWFSHLSLLSGWEHRRTPPRLGXFCIFSRESFVMLPRLVLNSWGSNDTPALASQSVVITGMSHHAPAFPMLF

SEQ ID NO: 9826 - protein, 71 aa, Homo sapiens
  DOMAIN (4)..(26): TRANSFORMING PROTEIN P21 RAS SIGNATURE domain identified by eMATRIX, accession number PR00449A, p-value=6.700e-15, raw score of 13.20
  DOMAIN (5)..(71): Ras family domain identified by PFam, accession name ras, E- value=1.7e-05, PFam score of -74.4
MREYNLVVLGSGGVGKSALTVQFVQGIFVEKYDPTIEDSYRKQVEVDCQQCMLEILDTAGTLSPRLTTYRT

SEQ ID NO: 9827 - protein, 367 aa, Homo sapiens
  DOMAIN (4)..(26): TRANSFORMING PROTEIN P21 RAS SIGNATURE domain identified by eMATRIX, accession number PR00449A, p-value=4.706e-19, raw score of 13.20
  DOMAIN (5)..(212): Ras family domain identified by PFam, accession name ras, E- value=1.3e-74, PFam score of 261.3
MREYKLVVLGSGGVGKSALTVQFVQGIFVEKYDPTIEDSYRKQVEVDCQQCMLEILDTAGTEQFTAMRDLYMKNGQGFALVYSITAQSTFNDLQDLREQILRVKDTEDVPMILVGNKCDLEDERVVGKEQGQNLARQWCNCAFLESSAKSKINVNEGPIIRPLVGETKGTGHTSLAAVILALSITNVSSCTGWGVQRSHQDQGNSKHAASSVWKVGFGIVRLGTGTCLSSLERGYMCMEKEMFDPYTPSRVLKPRVKLGPDVVAKEDKEMNPARKTSGKGSRKKGKNVEDRTVQFVQGIFVEKYDPTIEDSYRKIVLHTVTIIIPFKWRSPMHWTQAQPSPTGAWSLMNLVGGSHGGKDKDSKEPHP

SEQ ID NO: 9828 - protein, 239 aa, Homo sapiens
  DOMAIN (82)..(105): TRANSFORMING PROTEIN P21 RAS SIGNATURE domain identified by eMATRIX, accession number PR00449C, p-value=1.947e-18, raw score of 17.27
  DOMAIN (44)..(232): Ras family domain identified by PFam, accession name ras, E- value=1.5e-29, PFam score of 111.6
  misc_feature (1)...(239): Xaa = X or * as defined in Table 2
IPRSGITGSEGDYPVYKSMCLTAPSMALSRSSVFKQITSLREYKLVVLGSXGVGKSALTVQFVHGIFVEKYDPSIEDSYRKQVEVDCQQCMLEILDTAGTEQFTAMRDLYMKNGQGFALSIFYLQLQSTFNGLYRDLEGNQILRVXGTREVMFPMILVGNKCDLEDERVVGKEQGQNLARQWCTLALLESSARRSEIQVNEVLYDPVRQINREYTPVEKKKPXKNSMSTLLGPIVRRQL

SEQ ID NO: 9829 - protein, 80 aa, Homo sapiens
  misc_feature (1)...(80): Xaa = X or * as defined in Table 2
VPAQCSFXDTASCLLVKRKMRLDAVAHAYNPSTLGGRGGWITRGQEFKTSLANMVKPVSTKNKKISRVWWHNRNPSYSGG

SEQ ID NO: 9830 - protein, 408 aa, Homo sapiens
  DOMAIN (293)..(394): Gag P30 core shell protein domain identified by PFam, accession name Gag_p30, E-value=3.4e-12, PFam score of 46.2
MPTVGKAQARRRTRDTLLLDITQVLIDQSPRKDTGLAQQTGVIVPSKGIVKYWRAQLKGDMKYASPAFELFYFSVRAQSTDGIVTLLDPTTREDCDISSAPNPEVRTQRQAEVAGVGLLAVKVPRDEEGVLGGAPGPQKRSRVCGEPTLQRRSGPLPVARPGSRCPPPTSVSSPVPEDEYGRTVVMIRLDNPGISGRTIENNPPELEKQLPGEPSENSPYLGPPQVLFLLRDPREDVMLLLNQTPTTAEKQAVLQAAEIFRNEQQISYNTSKGKKGDRECEEIAETPFQIGSEAVPLDNPDWNSSSSAGEWKRRHFLICILEGLERTKAKFLNCSKLSMVDQKPDENPAAFMERLREALIEQTSLSPDSVEKQLILKDKFVTQSASNIRRKLQKQAIGPISTLKNLLK

SEQ ID NO: 9831 - protein, 39 aa, Homo sapiens
WSLSVLGSGRRKRSQGTEELLCQSHTLLGDTGNSISHSH

SEQ ID NO: 9832 - protein, 219 aa, Homo sapiens
  misc_feature (1)...(219): Xaa = X or * as defined in Table 2
TNFLFALSPSCLAGLLPPKFKQFSCLSLLSSWDYRNFYIFWXRWGFTMLARLVSNSXPQCDPHTSASHSAGITGMSHCAWSXTLNFFSYELFFSFTSALSXKDHCKGGHNMGCQFTXMHQXLXEKPPXLLFETESRSVAQAGVQWRNLGSLQPPSPGFKRFSCLSLPSSWDYLRTPPRPANCCCIFSRDGVSPCWPGWSQSLDLVICPPWPPKVLGLQA

SEQ ID NO: 9833 - protein, 211 aa, Homo sapiens
  DOMAIN (43)..(52): Ly-6 / u-PAR domain proteins domain identified by eMATRIX, accession number BL00983A, p-value=7.480e-09, raw score of 5.84
  DOMAIN (32)..(160): u-PAR/Ly-6 domain identified by PFam, accession name UPAR_LY6, E-value=7.7e-06, PFam score of 25.4
  misc_feature (1)...(211): Xaa = X or * as defined in Table 2
RLEEDLGRRQSLAPVGVRVETYFTVVLWTITMGIQGGSVLFGLLLVLAVLCHSGHXPCQCYNGFLPQTADCQKQPFNCSSGFWMRVFITQKLGYQVYNKCWKFEHCNFNDRHNPAXRKMGLTILLCKKGLRCNFTERLENGGTSLSEKTVLLLGELHFWAAAWEPSIPKSNTRECFLTKLPRSLRSSVFPLGWPHSKGLDIFQMGSWLGKE

SEQ ID NO: 9834 - protein, 139 aa, Homo sapiens
  DOMAIN (89)..(100): Nuclesosome assembly protein (NAP) domain identified by eMATRIX, accession number PF00956A, p-value=1.000e-13, raw score of 11.88
  DOMAIN (43)..(139): Nucleosome assembly protein (NAP) domain identified by PFam, accession name NAP_family, E-value=1.7e-48, PFam score of 174.5
RHLLAAPPPAPPAAAAAAALSHCLRSSGRLAPHTSRRLPRVVKRRVNALKNLQVKCAQIEAKFYEEVHDLERKYAVLYQPLFDKRFEIINAIYEPTEEECEWKPDEEDEISEELKEKAKIVDEKKDEEKEDPKGIPEFW

SEQ ID NO: 9835 - protein, 33 aa, Homo sapiens; identical to SEQ ID NO: 8512
  misc_feature (1)...(33): Xaa = X or * as defined in Table 2

SEQ ID NO: 9836 - protein, 128 aa, Homo sapiens
SRSSWSLPAEPLVTWVKTFGPFGSGTQDNLTMYMDLVDGIFLNQIMLQIDPRPTNQRINKHVNNDVNLRIQNLTILVRNIKTYYQRWGDDYDEEGEEADEPGEEGGDEEHDPDYDPKKDQNPTECKQQ

SEQ ID NO: 9837 - protein, 134 aa, Homo sapiens; identical to SEQ ID NO: 8513
  DOMAIN (97)..(108): Nuclesosome assembly protein (NAP) domain identified by eMATRIX, accession number PF00956A, p-value=1.000e-13, raw score of 11.88
  DOMAIN (51)..(134): Nucleosome assembly protein (NAP) domain identified by PFam, accession name NAP_family, E-value=5.3e-36, PFam score of 132.2

SEQ ID NO: 9838 - protein, 265 aa, Homo sapiens; identical to SEQ ID NO: 8514

SEQ ID NO: 9839 - protein, 327 aa, Homo sapiens
MDVTVSELLELFLQSPLVTWVKTFGPFGSGSQDNLTMYMDLVDGIFLNQIMLQIDPRPTNQRINKHVNNDVNLRIQNLTILVRNIKTYYQDMGYGQTQAWGAGILESFLGGNVCLRLVGLTGREGVSSGQERHLQSFGDIKQPEEAQGRMVGSFERTPQICGLGYRFRKGELEPLEVAVFVGTGSVGAAVMVAMGAATLEAPEALESINQESSCGCIKPCGNSLEWRQLARALLVRWGDDYDEEGEEADEEGEEEGDEENDPDYDPKKDQNPAECKQQLKQGCMWPLRDNLHWSTFCFPGKGLNLHHLTSLFSKLFVVCLLCFCFCS

SEQ ID NO: 9840 - protein, 436 aa, Homo sapiens
  DOMAIN (208)..(249): Nuclesosome assembly protein (NAP) domain identified by eMATRIX, accession number PF00956B, p-value=3.721e-26, raw score of 23.14
  DOMAIN (124)..(415): Nucleosome assembly protein (NAP) domain identified by PFam, accession name NAP_family, E-value=1e-114, PFam score of 394.5
  misc_feature (1)...(436): Xaa = X or * as defined in Table 2
SARGAASCSSRCCCRCRPESLPAQLRAAWLPILVADIWSSYNMADIDNKEQSELDQDLDDVEEVEEEETGEETKLKARSAXLFRMMQNPQILAALQERLDGLWVETPTGYIESLPRVVKRRVNALKNLQVKCAQKETQFYEEVHDLERKYAVLYQPLFDKRFEIINAIYEPTEEKECEWETRXRKDEDFGGNWKEKGQIEDEKKDEEKEDPKGIFPEFWLTVFKNVDLLSDMVQEHDEPILKHLKDIKVKFSDAGQPMSFVLEFHFEPNEYFTNEVLTKTYRMRSEPDDSDPFSFDGPEIMGCTRVPRXDWKKGKNVTLKTIKKKQKHKGRGTVPYCDLKPVSNDSFFNFFGPLPESSLRSGDLDDDAEAILAADFEIGHFYRERIIPRSVVNFTGEAIEDDDDDYDEEGRXRSGXGRLAPHTSRRYLEFLQHGRH

SEQ ID NO: 9841 - protein, 272 aa, Homo sapiens
  misc_feature (1)...(272): Xaa = X or * as defined in Table 2
PRARAERPAPASCSSPTSTRTTPDTEDVCIVERLFSSSLVAIVSLKAPRKLKVCHFKKGTEICNYSYSNTILAVKLNRQRLIVCLEESLYIHNIRDMKVLHTIRETPPNPAGLCALSINNDNCYLAYPGSXSGEAGAGQLLFANFNQDNTDTEDVCIVERLFSSSLVAIVSLKAPRKLKVCHFKKGTEICNYSYSNTILAVKLNRQRLIVCLEESLYIHNIRDMKVLHTIRETPPNPAGLCALSINNDNCYLAYPGSATIGEVQVFDTINLR

SEQ ID NO: 9842 - protein, 90 aa, Homo sapiens
  DOMAIN (12)..(40): !!!! PROTEIN ALU SUBFAMILY WARNING ENTRY NUCLEAR PHOSPHO domain identified by eMATRIX, accession number PD02454B, p-value= 4.450e-20, raw score of 11.61
  misc_feature (1)...(90): Xaa = X or * as defined in Table 2
HFGRPRQVDCLSSGVQDQPGQHGEVQSVLKLKKLAGHGGAHLXSQLLWRLRHENHLNLGGRGCSEPRWCHFTPAWTTEQDSVXNNNNNNK

SEQ ID NO: 9843 - protein, 144 aa, Homo sapiens
LLFANFNQDNTSLAVGSKSGYKFFSLSSVDKLEQIYECTDTEDVCIVERLFSSSLVAIVSLKAPRKLKVCHFKKGTEICNYSYSNTILAVKLNRQRLIVCLEESLYIHNIRDMKVLHTIRETPPNPAGLCALSINNGFGEGDRD

SEQ ID NO: 9844 - protein, 440 aa, Homo sapiens
  misc_feature (1)...(440): Xaa = X or * as defined in Table 2
MLLRLQRIKTLRPPGCPHPMTTCSAGTLSAVPCVSPRQVFVFERRFCLWHSHVEMFTHVLPFVISADTEDVCIVERLFSSSLVAIVSLKAPRKLKVCHFKKGTEICNYSYSNTILAVKFNRQRLIVCLEESLYIHNIRDMKVLHTIRETPPNPAGLCALSINNDNCYLAYPGSATIGEVQVFDTINLRAANMIPAHDSPLAALAFDASGTKLATASEKGTVIRVFSIPEGQKLFEFRRGVKRCVSICPLAFSMDGMFLSASSNTEDTVHIFKLETVKEKPPEEPTTWTGYFGKVLMASTSYLPSQVTEMFNQGRAFATVRLPFCGHKNILLGXPTIQKIPRLLVGAADGYLYMYNLDPQEGGECALMKQHRLDGSLETTNEILDSASHDCPLVTQTYGAAAGKAYTDDLGAVGGACLEDEASALRLDEDSEHPPMIIRTD

SEQ ID NO: 9845 - protein, 480 aa, Homo sapiens
  misc_feature (1)...(480): Xaa = X or * as defined in Table 2
VQPDPPSRARPPRPGPLAARPAMNLASQSGEAGAGQLLFANFNQDNTEVKGASRAAGLGRRAVVWSLAVGSKSGYKFFSLSSVDKLEQIYECTDTEDVCIVERLFSSSLVAIVSLKAPRKLKVCHFKKGTEICNYSYSNTILAVKLNRQRLIVCLEESLYIHNIRDMKVLHTIRETPPNPAGLCALSINNDNCYLAYPGSATIGEVCQVFDTINLRAANMIPAHDSPLAALAFDASGTXLATASEKGTVIRVFSIPEGQKLFEFRRGVKRCVSICSLAFSMDGMFLSASSNTETVHIFKLETVKEKPPEEPTTWTGYFGKVLMASTSYLPSQVTEMFNQGRAFATVRLPFCGHKNICSLATIQKIPRLLVGAADGYLYMYNLDPQEGGECALMKQHRLDGSLGKRPNEILDSASHDCPLVTSDITAQLAGKGTYVPSSPTETCPTRDDLGAVGGACLEDEGPALRLDEDSEHPPMILRTD

SEQ ID NO: 9846 - protein, 348 aa, Homo sapiens
  misc_feature (1)...(348): Xaa = X or * as defined in Table 2
LGLEGDGGASQWVGGRQRLQDCRNRSLQGSPETLIPPSLQITVPSRTCFPSLQVGLTFPPRAVPSAAAALGRNLRLXRGWHRRIIPPWVASISRAASSWGTKPPLFKVPSQPETLGETWVIAKMAGTYGGSRNTLPRSPGGNFRSTVPRXVQTTPRQPGAGLPKPVVVATSSDXQASRSSPGRSRKDGPDSFPALPVSRGEPESPSLQPPPPSTRXPSRLRGPRPPSALSGPLRAPEHAQSSTSPSRWTTSPRMLRAPARAPPCPSPTLVPVSTPSPPFPXRWSQXSGHTPGRFFPCSPPRIRASACASLSGTTDGSTAYQIAHAPHHVFLTSLRAFLRLAGSCTNHG

SEQ ID NO: 9847 - protein, 44 aa, Homo sapiens
  misc_feature (1)...(44): Xaa = X or * as defined in Table 2
NMTKLQVVSKNLLLLKMLIKERETQRKGGSSXKSTQGAKGGAPR

SEQ ID NO: 9848 - protein, 94 aa, Homo sapiens
  misc_feature (1)...(94): Xaa = X or * as defined in Table 2
GQKKGFSMGGXGEKGSLGNPSWGTAGGQAPVPPQGLTGTRFTQGSSGTAGPPASTFCLGGHGAVVGTYGRQMYMYEFVFCSVGVAQKKDLCPRE

SEQ ID NO: 9849 - protein, 116 aa, Homo sapiens
  DOMAIN (28)..(109): Armadillo/beta-catenin-like repeats domain identified by PFam, accession name Armadillo_seg, E-value=2.4e-05, PFam score of 31.2
ALVTEFQETHSQDAIEHVLANLANFAYDPSNYQYLRQLQVLHLFLDSLSEENETLVEFAIGGLCNLCPDRANKEHILHAGGVPLIINCLSSPNEETVLSVITTLMHLSPPGRSFLP

SEQ ID NO: 9850 - protein, 41 aa, Homo sapiens
  DOMAIN (1)..(41): Glycosyl hydrolases family 18 domain identified by PFam, accession name Glyco_hydro_18, E-value=2.7e-09, PFam score of 33.3
EICQFLKGAKITRLQDQQVPYAVKGNQWVGYDDVKSMETKD

SEQ ID NO: 9851 - protein, 119 aa, Homo sapiens
  misc_feature (1)...(119): Xaa = X or * as defined in Table 2
LILVKAAAALDTGHLSPWFGVRCAFQNPGRRGCSPEGKQLQSRVIXGXEFQSTAACEEHYMASIRRSVSPSLSVCTSPLPSVLDILPPTDLYFEQHSPILXLKVKGSLHXRSSPLRKES

SEQ ID NO: 9852 - protein, 422 aa, Homo sapiens
  DOMAIN (116)..(135): 2-S GLOBULIN FAMILY SIGNATURE domain identified by eMATRIX, accession number PR00551D, p-value=6.044e-09, raw score of 12.16
  DOMAIN (58)..(399): Glycosyl hydrolases family 18 domain identified by PFam, accession name Glyco_hydro_18, E-value=3.7e-95, PFam score of 321.6
  misc_feature (1)...(422): Xaa = X or * as defined in Table 2
MGATTMDQKSLWAGVVVLLLLQGEMGFCYVARAGLELLGSRSPPASASQSAGITGSAYKLVCYFTNWSQDRQEPGKFTPENIDPFLCSHLIYSFASIENNKVIIKDKSEVMLYQTINSLKTKNPKLKILLSIGGYLFGSKGFHPMVDSSTSRLEFINSIILFLRNHNFDGLDVSWIYPDQKENTHFTVLIHELAEAFQKDFTKSTKERLLLTAGVSAGRQMIDNSYQVEKLAKDLDFINLLSFDFHGSWEKPLITGHNSPLSKGWQDRGPSSYYNVEYAVGYWIHKGMPSEKVVMGIPTYGHSFTLASAETTVGAPASGPGAAGPITESSGFLAYYEICQFLKGAKTRGSRDQQVPYAVKGNQWVGYDDVKSMGDQGSVLXRFKTWGGAMIWSIDMDDFTGKSCNQGPYPLVQAVKRSLGSL

SEQ ID NO: 9853 - protein, 62 aa, Homo sapiens
  misc_feature (1)...(62): Xaa = X or * as defined in Table 2
KLGTEQDKGGRIILLVWAKLHQLSYXHIRVLSIGGNXGPGEGXMGMPGVHLLFFRTKIRIQI

SEQ ID NO: 9854 - protein, 339 aa, Homo sapiens
  DOMAIN (110)..(122): Chitinases family 18 proteins domain identified by eMATRIX, accession number BL01095B, p-value=3.842e-13, raw score of 10.82
  DOMAIN (82)..(220): Glycosyl hydrolases family 18 domain identified by PFam, accession name Glyco_hydro_18, E-value=6.1e-34, PFam score of 116.0
  misc_feature (1)...(339): Xaa = X or * as defined in Table 2
MTLAPSDQDLFVFRSGPPAAAGMPCLFFPEVPFCTRVHQPTGRDGSKNLLNELFIACPGGLMAQGPLDPTESSVPNTKALCGIFSDVAATAENRQTFMQSAIQFLRKYNFDGLDIDWEYPGNRGSPADTQQLFTILLKEMYEAFEQESTRSKKPRLLMSAAVSAGKGTIETACQIPEMSSSTPSRKEPPRVWNAPWEVPYVYKGNQWIRYDNSKSFTLKAVLPHSKDKVXTTEFFALLCLSPAHGKFTQAEPKSGGDRASGLLQSTHLYPGHQLAPIITAAPGGGSTGGSGFCTGKSKGLYPVPHSKHAFYNCVDEHTYEEACQEGLVFDTSCSCCNWA

SEQ ID NO: 9855 - protein, 241 aa, Homo sapiens
  DOMAIN (72)..(91): 2-S GLOBULIN FAMILY SIGNATURE domain identified by eMATRIX, accession number PR00551D, p-value=6.044e-09, raw score of 12.16
  DOMAIN (14)..(217): Glycosyl hydrolases family 18 domain identified by PFam, accession name Glyco_hydro_18, E-value=1.3e-54, PFam score of 185.5
  misc_feature (1)...(241): Xaa = X or * as defined in Table 2
XVVVLLLLQGGSAYKLVCYFTNWSQDRQEPGKFTPENIDPFLCSHLIYSFASIENNKVIIKDKSEVMLYQTINSLKTKNPKLKILLSIGGYLFGSKGFHPMVDSSTSRLEFINSIILFLRNHNFDGLDVSWIYPDQKENTHFTVLIHELAEAFQKDFTKSTKERLLLTAGVSAGRQMIDNSYQVEKLAKDLDFINLLSFDFHGSWEKPLITGDNSPLSKGWQDRGPSSYYNCEICCGVLDT

SEQ ID NO: 9856 - protein, 130 aa, Homo sapiens
  misc_feature (1)...(130): Xaa = X or * as defined in Table 2
CSAHSTALRVVRNHFYFTITATQVHKGSSSHPCTDRGNEMMASSPQPSAFGIPGWGARXPAPAPLPHRRGLPGSVTGXWRPIVGQXPSPHTHCKASTKAQPEGPGTPPPGKPSWKELPESHKKSLAPSFP

SEQ ID NO: 9857 - protein, 359 aa, Homo sapiens
  misc_feature (1)...(359): Xaa = X or * as defined in Table 2
QPSQPFLSAGLNQTVPWGTCLHRAELSPSTENSSQLDFEDVWNSSYGVNDSFPDGDYDANLEAAAPCHSCNLLDDSALAFFILNQCSWGILASRTGLFMPFRPFFRWQLCPGWPVLGTAGCGAVAFFQHLWVPVFGPQGYGSTRSSALLXLGATGVWYGSAFAQALLLGCHASLGHRLGAGQVQGLTLGLTVGIWGVAALLTLPVTLASGASGGLCTLIYSTELKALQATHTVACLAIFVLLPLGLFGAKGLKEGIGLMGPGPLDEISLWAWFIFWWPHGVVLGLDFLVRSKRLLLSTCLAQQALDLLLNLAEALAILHCVGTPLLLALFCHQATRTLLPSLPLPEGWFFHLDTLGSKS

SEQ ID NO: 9858 - protein, 97 aa, Homo sapiens
  misc_feature (1)...(97): Xaa = X or * as defined in Table 2
KRFLHLHQGHTSGKGSRGFHLCCCGFSSKSPGSXPGAGGASSSSQSKSPGPRPARVRRRLWVRAPPATSQEEASAGRRVRPPSSVHVNIPPPSVRPA

SEQ ID NO: 9859 - protein, 564 aa, Homo sapiens
  DOMAIN (253)..(300): kw TRANSCRIPTASE REVERSE II ORF2 domain identified by eMATRIX, accession number DM01354V, p-value=1.000e-40, raw score of 12.97
  DOMAIN (35)..(266): Reverse transcriptase domain identified by PFam, accession name rvt, E-value=0.017, PFam score of -34.2
MGDFNTPLSTLDRSMRQKVNKDIQELNSALHHMDLIDIYRTLHPKSTEYTFFSAPQRTYSKIDHIVGSKALLSKCKRTEIITNCLSDHSAIKLELRIKKLTQNHSITWKLNNWLLNDYWVHNEMKAEIKMFFETNEIKDTTYQNLWDTFKATLNQEEVESLNRPITGSEIQAMINSLGTKKLQDQTDSQPSSTRDDMIVYLENPIVSAQNLLKLISNFSKVSGYKINVQKSQAFLYTNNRQTESQIMSKLPFTIASKIIKYLGVQLTRDVKDPFKENYKPLLNEIKEDTNKWKNIPCSWIGRINIMKMAILPKVIYRFNAIPIKLPMTFFTELEKSTLKFIWNQKRACIARSILSQRNKAGGITLPDFKLYYKATVTKTAWYWYQNRDIDQWNITEPSETMPHIYHYLIFEKPDKNKKWGKDSLFNKWCWENWLATCRKLKLDPFLTPYTKINSRWIKDLNVRPKTINTLEENLGNTIQDIGMGKDFMSKTPKAMATKAKIDKWDLIKLKSFCTAKETTTRVNRQPTEWEKIFAIYSSDKGLISRIYKELKQIYKKKTTPSTSG

SEQ ID NO: 9860 - protein, 530 aa, Homo sapiens
  misc_feature (1)...(530): Xaa = X or * as defined in Table 2
SLISCSEGSSPKASGPSSXEHCPAKPLGPGTWPLLTPGPESGGGGPDVGLRGQPMNAAPVXSSPCLXNPGFLTPSGVSSVXMPVLLKEPAFQMAEKAPNGAVCAPSFPASTSGLWSPAVGVPRSRSLHGSALPWGHAPRQSGYPGQSAPAGCGPRPPGGGSRSPPGRSVPGSGAWRWPRGRSEACTAPRAWRSALGESCGPAGSGAXAWXWQTAPSPHWGWIGSXXXVGHLLRAGCAPCWPCLGTGCTGLPSRSGHKSLSLSVQQVQWLIRFFFPLSXMXKPAACLPSXRERPSCAHWTAGGVMGFLSVXSVIRXSLSHCLAAESSPHPGAPGQGTATQIGGGGSRYVQRGXNHRPCRSXPIQRPCGQAGSGGRVASTWCAQXQTPPGSHSPPTANREINPGPAAAADTRSCWGHKRSWRGWRGLAPWRLGFGSPWNSRDQGPAGIPAARRGGPTFGFLAHGPRXRRTPRDGREGGKGAGAKPSETLTRSPPVWRGKRGSANGFLSWVQILQYFAAGNGIWEMGRGLRIL

SEQ ID NO: 9861 - protein, 348 aa, Homo sapiens
  DOMAIN (74)..(120): kw TRANSCRIPTASE REVERSE II ORF2 domain identified by eMATRIX, accession number DM01354O, p-value=1.000e-40, raw score of 8.73
  DOMAIN (109)..(301): Reverse transcriptase domain identified by PFam, accession name rvt, E-value=9.5e-29, PFam score of 108.9
MGRNRSRKDENSKNQSASSPPKDRSSSPATEQSWMENDFDELTEVGFRRLNQEEVESLNRPIRGSEIEAIINSLPTKKSPGPDGFTAEFYRRYKEELVPFLLKLFQSYEKEVILPNSFYEASIILIPKPGRDTTKKENFRPISLMNINAKILNKILANQIPQHIKKLNHEDQVGFIPGMQALFHIQESINVIHHINRTKDKNHIIISIDAEKAFDKIQQRFMLKTLNKLDDMIVYLENPIVSAQNLLKLISNFSKVSGYKINVQKSQAFLYTNNRQTESQIMSELPFTIATKRIKYLGIELTRDVKDLFKENYKPLLNQIKEDTNKWKNIPCSWIGRINIVKRATLPK

SEQ ID NO: 9862 - protein, 281 aa, Homo sapiens
  DOMAIN (121)..(168): kw TRANSCRIPTASE REVERSE II ORF2 domain identified by eMATRIX, accession number DM01354V, p-value=1.000e-40, raw score of 12.97
  DOMAIN (2)..(137): Reverse transcriptase domain identified by PFam, accession name rvt, E-value=0.097, PFam score of -44.8
  misc_feature (1)...(281): Xaa = X or * as defined in Table 2
TEPKTKTTXLSQXMQKRPLTKFNNPSCXKLSINIVLEVLARAIRQEKEIKGIQLGKEEVKLSLFADDMIVYLENPIISAQNLLKLISNFSKVSGYKINVQKSQAFLYTNNRQTESQIMSELPFTIASKRIKYLGIQLTRDVKDLFKENYKPLLNEIKEDTNKWKNIPCSWIGRINIVKMAILPKVIYRFNAIPIKLPMTFFTELEKTTLKFIWNQKRARITKSILSQKNKAGGITLPDLKLYYKAIVTKTAWYCYQNRDIDQWNRTEPXEIMLHIYNYLIF

SEQ ID NO: 9863 - protein, 965 aa, Homo sapiens
  DOMAIN (309)..(355): kw TRANSCRIPTASE REVERSE II ORF2 domain identified by eMATRIX, accession number DM01354O, p-value=1.000e-40, raw score of 8.73
  DOMAIN (342)..(602): Reverse transcriptase domain identified by PFam, accession name rvt, E-value=5.8e-73, PFam score of 255.8
MRQKVNKDTQELNSALHQEDLIDIYRTLHPKSTEYTFFSAPHHTYSKTDHIVGSKALLSKCKRTEIITNCLSDHSAIKLELTIKKLTQNHSTTWKLNNLLLNDYWVNNEMKAEIKMFFETNKNKDTTYQNLWDTFKAVCKGKFIALNAHKRKQERSKIDTLTAQLKELEKQEQTHSKASRRQEITKIRAELKETETQKTLQKINESRSWFFERINKIDRPLARLTEKKRKKNQIDAIKNDKGDITTDPTEIQTTIREYYKHLYANKLENLEEMDKFLDTYVLPRLNREEAEPLNTPIAGSEIEAIINSLPTKKSPGPDGFTAKFYQRYKEELVPFLLKLFQSIEKEGILPNSFYEASIILIPKPGRDTTKKENFRPISLMNINAKILNKVLANRIQQHNKKLIHHDQVGFIPGMQGWFNIRKSINGIQHINRTKDKNHTIISTDAEKAFDKIQKPFMLKTLNKLGIDGTYLKIIRAIYDKPTANIILNGQKLEAFPLKTGTRQGCPLSPLLFNIVLEVLARAIRQEKEIKDDMIAYLENPIISVQNLLKLISNFSKVSGYKINVQKSQAFLYTSNRQTESQIMSELPFTIASKRIKYLGIQLTRDVKDLFKENYKPLLKEIKEDTNKWKNIPCSWVGRINIVKMAILPKVIYRFNAISIKLPMTFFTELDKTTLKFIWNQKRACIAKSILSQENKAGGIMLPDFKLYYKATVIKTAWHWYQNRDIDQWNRTEPSEIMPHIYNYLIFDKPDKNKKWGKDSLFNKWCWENWLAICRKLKLDPFLTPYTKINSRWIKDLNVRPKTIKTLEENLGNTIQDIGMGKDFMSKTPKAMATKDKIDKWDLIKLKSFCTAKGTAIRVNRQPTEWEKTFATYSSDKRLISRIYNELRHIYKKKTNNPIKKWAKDMNRHCSKEDIYAAKKHMKKCSSSLAIREMQIKTTVRYHLTPVRMAIIKSQETTGAGEDVEK

SEQ ID NO: 9864 - protein, 222 aa, Homo sapiens
  DOMAIN (162)..(209): kw TRANSCRIPTASE REVERSE II ORF2 domain identified by eMATRIX, accession number DM01354V, p-value=1.000e-40, raw score of 12.97
  DOMAIN (1)..(175): Reverse transcriptase domain identified by PFam, accession name rvt, E-value=0.00052, PFam score of -12.7
IQTTIREYYKLLYANKLENLEEMDKFLDTYTLPRLNQEEVESLKTPITGTEPRFGPTKNVQDQMDSQLNSTRVLEVLARAIRQEKEIKGIQLGKEEVKLSLFADDTIVYLENPIVSAQNLLKLISNFSKVSGYKINVQKSQAFLYTNNRQTESQIMSELPFRITTKRIKYLGIQLTRDVKDLFKENYKPLLNEIKEDTNKWKNIPCSWIGIINITKMVILPK

SEQ ID NO: 9865 - protein, 392 aa, Homo sapiens
  DOMAIN (81)..(128): kw TRANSCRIPTASE REVERSE II ORF2 domain identified by eMATRIX, accession number DM01354V, p-value=1.000e-40, raw score of 12.97
MINSLGTKKLQDQTDSQPSSTRDDMIVYLENPIVSAQNLLKLISNFSKVSGYKINVQKSQAFLYTNNRQTESQIMSKLPFTIASKIIKYLGVQLTRDVKDPFKENYKPLLNEIKEDTNKWKNIPCSWIGRINIMKMAILPKVIYRFNAIPIKLPMTFFTELEKSTLKFIWNQKRACIARSILSQRNKAGGITLPDFKLYYKATVTKTAWYWYQNRDIDQWNITEPSETMPHIYHYLIFEKPDKNKKWGKDSLFNKWCWENWLATCRKLKLDPFLTPYTKINSRWIKDLNVRPKTINTLEENLGNTIQDIGMGKDFMSKTPKAMATKAKIDKWDLIKLKSFCTAKETTTRVNRQPTEWEKIFAIYSSDKGLISRIYKELKQIYKKKTTPSTSG

SEQ ID NO: 9866 - protein, 204 aa, Homo sapiens
  DOMAIN (10)..(65): kw TRANSCRIPTASE REVERSE II ORF2 domain identified by eMATRIX, accession number DM01354Q, p-value=1.000e-40, raw score of 9.23
  DOMAIN (1)..(157): Reverse transcriptase domain identified by PFam, accession name rvt, E-value=0.00013, PFam score of -3.9
MNINAKILNKILANQIPQHIKKLNHEDQVGFIPGMQALFHIQESINVIHHINRTKDKNHIIISIDAEKAFDKIQQRFMLKTLNKLDDMIVYLENPIVSAQNLLKLISNFSKVSGYKINVQKSQAFLYTNNRQTESQIMSELPFTIATKRIKYLGIELTRDVKDLFKENYKPLLNQIKEDTNKWKNIPCSWIGRINIVKRATLPK

SEQ ID NO: 9867 - protein, 480 aa, Homo sapiens
  DOMAIN (189)..(235): kw TRANSCRIPTASE REVERSE II ORF2 domain identified by eMATRIX, accession number DM01354O, p-value=1.000e-40, raw score of 8.73
  DOMAIN (222)..(441): Reverse transcriptase domain identified by PFam, accession name rvt, E-value=1.6e-39, PFam score of 144.7
MKLPEEASGSNICCYAIFAVLQPLLVIPKETVSGVDLQQTPTDLQLSDLTPGRKTNKQKGIASPSTKRTSTPKPHLQANAQRFCHHQACVTRVPKGSTKHGKEQLVPATAKTCQIVKNINAMKKLHQLTEIQITIREYHKHLYANKLKNLEEMDKFLDTYTLPRLKQEEVESLNRPIMGSEIEAIINSLPTKKSPGPDGFTAKFYERYKEELVSFLLKLFQSIEKEGILPNSFYEASIILIPKPGRDTTKKENFRPISLKNIDAKILNKILANRIRQPIEKLIHHDQVGFIPEMKGWFKKCKSINVIHHINQTNDKNHMIISIDAEKAFDKTQQPFMLKTLNKLGTIRQKKEIKGIQLGKEEVKLSLFADDMIVYLENSIVSAQNLLKLISNFSKVSRYKINLQKSQAFLYTNNRHMESQITSELPFTIDTKRIKYLGIQFTRDVKDLFKENYKLLLNEIKEDTNKWKNIPCSWIEESIS

SEQ ID NO: 9868 - protein, 322 aa, Homo sapiens
  DOMAIN (126)..(171): kw TRANSCRIPTASE REVERSE II ORF2 domain identified by eMATRIX, accession number DM01354N, p-value=1.000e-40, raw score of 13.17
  DOMAIN (67)..(297): Reverse transcriptase domain identified by PFam, accession name rvt, E-value=4.4e-07, PFam score of 30.9
MGRNQCKKAENSKNQNTSSPPKDNNFLPAREQNWMENEFDELTEVRFRRWVITNSSEQKEHDLTQCNEAKNLEKRSWFLEKINKIDRPLARLVKKKREKNQINTIKNDKGDIITDPTEIQTTIREYYKHLYANKLENLEEMDKFLDTYTLPTLNKEEVESLNKPITSSEIEAVIISLPTKKVQDQKDSQPNSTRVLEVLATAIRQEKEIKDTQTGNEEVKLSLFADDMIVYLENPIVSVQNLFKLISNFSKVSGYKINVQKSQALLYTNNRQTESQIMSKLPFTIATKRIKYLGIQLTRDVKDLFKGNYKPLLKEIREDTNK

SEQ ID NO: 9869 - protein, 72 aa, Homo sapiens
LFVRCPVGSISLPTLSSPVKRYRFPHMAYPSLTRCIHSGLPQYCMSINCFPMHPGYRVPSRCFPVSPIFFPT

SEQ ID NO: 9870 - protein, 690 aa, Homo sapiens
  DOMAIN (288)..(333): kw TRANSCRIPTASE REVERSE II ORF2 domain identified by eMATRIX, accession number DM01354N, p-value=1.000e-40, raw score of 13.17
  DOMAIN (372)..(566): Reverse transcriptase domain identified by PFam, accession name rvt, E-value=2.1e-29, PFam score of 111.1
CKLLDGGQFYLVPCCISGENNIDWYMRDRSTRQKVNKDTQELNSALHQADLIDIYRTLHPKSTEYTFFSAPHHTYSKIDHIVGSKALLSKCKRTENVRNCLSDHSAIKLELRIKTLTQNCSATWKLNNLLLNDYWVNNEMKAEIKMFFETNENKYTTYQNLWDTFKAVCRGKFIALNAHKRKQERSKIDTLTSQLKELEKQEQTHSKASRRQEITKIRAELKEIEIQKTLQKINESRSWFFEKINEIDRPLARLIKKKREKNQIDTIKNDKGDITTNPTEIQTTIREYYKHLYANKLENLEEMDKFLDTYILPRLNQEEVESRNRPITGAEIEAIINSLPTKKSPGPDGFTAEFYQRYKEELVPILLKRFQSIEKVGILPNSFYEASIILIPKAGRDTTKKENFRPISLMNIDAKILNKILANRIQQHIKKLIHHDRVGFIPGMQGWFNIHKSINVIQHINRTKDKNHMIISIDAEKAFDKIQQPFMLKTLNKLDDMIVYLENPIDSAQNLLKLKSNFRKVSGQKINVQKSQAFLYTNNRQTESQIMSELPFTIASKRIKYLGIQLTRDVKDLFKENYKPLLNEIKEDTNKWKNIPCSWVGRINIVKMAILPKVIYRFNAIPIKLPMTFFTELEKTTLKFIRNQKRACITKSILSQKNKAGGITLPDFTLYYKATVTKTAWYLYQNRDID

SEQ ID NO: 9871 - protein, 102 aa, Homo sapiens
QHPCQPGPAHVPQARDQPQHGQPLGEGELPDGRAHCRAGQAAGAPAARHSEQGFQVLLASELLPQHPHAEGSWAQCRRGFQREESALDCRPGGRRGKWESAH

SEQ ID NO: 9872 - protein, 1084 aa, Homo sapiens
  DOMAIN (222)..(242): ALPHA-2A ADRENERGIC RECEPTOR SIGNATURE domain identified by eMATRIX, accession number PR00558C, p-value=1.198e-09, raw score of 6.54
  DOMAIN (524)..(1024): Reverse transcriptase domain identified by PFam, accession name rvt, E-value=3.1e-05, PFam score of 4.8
  misc_feature (1)...(1084): Xaa = X or * as defined in Table 2
MHCILPTPSGSGSFPVYTSQSQPKTPGAFSGTLSVREPLSPEPDVLLPGSAKCAALCWFVSVLDAASPVTRWPVSRSPWECRCVPSPPVREAPVSPPFQCAPPPYTDCLSPYLYEYTVCPSPCARVPIPSSTHPWEYKVPPPHAERLCPVSEDPPCLCNWKTRAAGARESSLVPCPYAARYPPSPPRVAWSSHFSYRGLSPSLGPNKPGNPRGPSESPAAAASRPRAAAASAPPPGAARLPASPTPRLARDRGVSHPARPCPAWPLRALTVAAASHGSATPASGPPPGREGVRSASLSPACRPAAHLVALNRPHRPPSTLTGAGPKSLEFCSWDGTSERLNQEDVESLNRPITGSEIEAIINSLPTKNVQDQKDSQPNSTRVLKVLARAVRQKKAIQGIQIGKEEVKLSLFADDMIVYLENPIVPAQNLLKLISNFSKVSGYKINVQKSQAFLYTNNRQTESQIMSELLFTIATKRIKYLGIQLTRDVKDLFKENYKPLLKEIREDTNKWKNIPCSWIGRINIMKMALLPKVIYRFNAIPIKLXLPTPSGSGSFPVYTSQSQPKTPGAFSGTLSVREPLSPEPDVLLPGSAKCAALCWFVSVLDAASPVTRWPVSRSPWECRCVPSPPVREAPVSPPFQCAPPPYTDCLSPYLYEYTVCPSPCARVPIPSSTHPWEYKVPPPHAERLCPVSEDPPCLCNWKTRAAGARESSLVPCPYAARYPPSPPRVAWSSHFSYRGLSPSLGPNKPGNPRGPSESPAAAASRPRAAAASAPPPGAARLPASPTPRLARDRGVSHPARPCPAWPLRALTVAAASHGSATPASGPPPGREGVRSASLSPACRPAAHLVALNRPHRPPSTLTGAGPKSLEFCSWDGTSERLNQEDVESLNRPITGSEIEAIINSLPTKNVQDQKDSQPNSTRVLKVLARAVRQKKAIQGIQIGKEEVKLSLFADDMIVYLENPIVPAQNLLKLISNFSKVSGYKINVQKSQAFLYTNNRQTESQIMSELLFTIATKRIKYLGIQLTRDVKDLFKENYKPLLKEIREDTNKCKNIPCSWIGRINIMKMALLPKVIYRFMLSPSSYD

SEQ ID NO: 9873 - protein, 503 aa, Homo sapiens
  DOMAIN (189)..(228): kw TRANSCRIPTASE REVERSE II ORF2 domain identified by eMATRIX, accession number DM01354X, p-value=9.143e-33, raw score of 13.86
  misc_feature (1)...(503): Xaa = X or * as defined in Table 2
TEPKTKTTXLSQXMQKRPLTKFNNPSCXKLSINIVLEVLARAIRQEKEIKGIQLGKEEVKLSLFADDMIVYLENPIISAQNLLKLISNFSKVSGYKINVQKSQAFLYTNNRQTESQIMSELPFTIASKRIKYLGIQLTRDVKDLFKENYKLPLIKEIREDTNKWKNIPCSWIGRMNIMKMAILPKVIYRFNAILIKLPLTSFTKLEKTTLKFIWNQKRARIAKSILSQKNKAGGITLPDFKLYYKAIVTKTAWYCYQNRDIDQWNRTEPXEIMLHIYNYLIFDKPEKNKQWGKDSLFNKWCWENWLTICRKLKLDPFLTSYTKINSRWIKDLNVRPKTIKTPEENLGNTIQDIGMGKDFMTKTPKAMATKAKIDKWDLIKLKSFCTAQETTIRVNRQPTEWEKISAIYSSDKGLISRIYKELKQIYKTKTNNPIKKWAKDMNRHFSKEDIYAAKRHMKKCSSSLAIREMQIKTTMRYHLTPVRMAIIRIKSGNNRCWRGCGEI

SEQ ID NO: 9874 - protein, 691 aa, Homo sapiens
PAEEVVTYIPLDFCHYHSEDGKQFLLPLTPTLLTHPLCLVTGTTSLLLVCVGKPEIFVAIHYYTPNTKLVPLARPRNSHVPHPPERTTVTQYSTCALLTALCLLLPVLQETAQSRRMVTSHPEDRPALARKHGASQPAGLGFPRTQTVTPAFTFQTPTAAEPALLTAWLGRAPETETITDMAGAAGTHRRKRRLEPEKRPGASQKTTLKERPPETGPWDLPPPPTERTTVTQYSTCALLTALCLLLPVLQETAQSRRMVTSHPEDRPALARKHGASQPAGLGFPRTQTVTPAFTFQTPTAAEPALLSAWLGRAPDTENITDMARATSRSITWGRMVSAKARGAAAVTEERETPERNLVQRNPDSNSSDISPESFLNSDLCWSQWASMPAEKSWNLCPHSLSALASSQLNLRLLGSGNDGSTSAALRLLGLRDGSTSPTLRLLGSGDDGSTSAALRLLGLRDGSTSPTLRLLGSGDDGSTSAALRLLGLRDGSTSPTLRLLGSGGAHAVVPQCSSIADWEREEEVFKPHEDRGSLICTELVHTYYDLQEVMDGNVITAKRTAAVSAIATKCDNLKTCHTSHGSVMAETAVINHKKRKNSPRIVQSNDLTEAAYSLSRDQKRMLYLFVDQIRKSDGTLQEHDGICEIHVAKYAEIFGLTSAEASKDIRQALKSFAGKEVVFYRPEKDPAMKKL

SEQ ID NO: 9875 - protein, 342 aa, Homo sapiens
  misc_feature (1)...(342): Xaa = X or * as defined in Table 2
TAEGTWIAVRRLRLEGTGGEMSRVPAFLSAAEVEEHLRSSSLLIPPLETALANFSSGPEGGVMQPVRTVVPVTKHRGYLGVMPAYSAAEDALTTKLVTLLRGPRHHLRSSLPTRVIVVTLLSPAMGTLLAVMDGKCSXIAKRTAAVSCHLPPSFLKPPSSEVLCILGAGVQAYSHYEIFTEQFSFKEVRIWNRTKENAEKFADTVQGEVRVCSSVQEAVAGADVIITVTLATEPILFGEWVKPGAHINAVGASRPDWRELDDELMKEAVLYVDSQEAALKESGDVLLSGAEIFAXAGEKXFKGVKPSPYCEKTPRCSKSLGMAVEDTVAAQTHPMIPWSSGK

SEQ ID NO: 9876 - protein, 678 aa, Homo sapiens
  DOMAIN (408)..(451): Acyl-CoA dehydrogenases proteins domain identified by eMATRIX, accession number BL00072E, p-value=9.122e-10, raw score of 24.12
  DOMAIN (182)..(678): Acyl-CoA oxidase domain identified by PFam, accession name ACOX, E-value=1.6e-293, PFam score of 988.5
LPPRSVGAYFAASWSVAMNPDLRRERDSASFNPELLTHILDGSPEKTRRRREIENMILNDPDFQHEDLNFLTRSQRYEVAVRKSAIMVKKMREFGIADPDEIMWFKKLHLVNFVEPVGLNYSMFIPTLLNQGTTAEKEKWLLSSKGLQIIGTYAQTEMGHGTHLRGLETTATYDPETQEFILNSPTVTSIKWWPGGLGKTSNHAIVLAQLITKGKCYGLHAFIVPIREIGTHKPLPGITVGDIGPKFGYDEIDNGYLKMDNHRIPRENMLMKYAQVKPDGTYVKPLSNKLTYGTMVFVRSFLVGEAARALSKACTIAIRYSAVRHQSEMKPGEPEPQILDFQTQQYKLFPLLATAYAFQFVGAYMKETYHRINEGIGQGDLSELPELHALTAGLKAFTSWTANTGIEACRMACGGHGYSHCSGLPNIYVNFTPSCTFEGENTVMMLQTARFLMKSYDQVHSGKLVCGMVSYLNDLPSQRIQPQQVAVWPTMVDINSPESLTEAYKLRAARLVEIAAKNLQKEVIHRKSKEVAWNLTSVDLVRASEAHCHYVVVKLFSEKLLKIQDKAIQAVLRSLCLLYSLYGISQNAGDFLQGSIMTEPQITQVNQRVKELLTLIRSDAVALVDAFDFQDVTLGSVLGRYDGNVYENLFEWAKNSPLNKAEVHESYHKHLKSLQSKL

SEQ ID NO: 9877 - protein, 62 aa, Homo sapiens
  DOMAIN (5)..(62): Acyl-CoA oxidase domain identified by PFam, accession name ACOX, E-value=4.9e-15, PFam score of 57.0
TFFFQVKPDGTYVKPLSNKLTYGTMVFVRSFLVGEAARALSKACTIAIRYSAVRHQSEIKPG

SEQ ID NO: 9878 - protein, 521 aa, Homo sapiens
  DOMAIN (21)..(60): PROTEIN ZINC FINGER ZINC-FINGER METAL-BINDING NU domain identified by eMATRIX, accession number PD01066, p-value=1.000e-39, raw score of 19.43
  DOMAIN (228)..(481): Zinc finger, C2H2 type domain identified by PFam, accession name zf-C2H2, E-value=4.7e-27, PFam score of 103.3
  misc_feature (1)...(521): Xaa = X or * as defined in Table 2
PQVIRPPWPPKVLGLQGLLTFRDVAIEFSQEEWKCLDPAQRTLYRDVMLENYRNLVSLDTSSKCMMKMFSSTGQGNTEVVHTGTLQIHASHHIGDTCFQEIEKDIHDFVFQWQENETNGHEALMTKYQKVDECTERHDQRHAGNKPLKMSLDQAFIRICLKCTYFTPKGKLVIKLRRLSTMLSHVSASQRISCRPKTRISNKYRNNFLQSSLLTQKREVHTREKSFQRNESGKAFNGSSLLKKHQIIHLGDKQYKCDVCGKDFHQKRYLACHRCHTGENPYTCNECGKTFSHNSALLVHKAIHTGEKPYKCNECGKVFNQQSNLARHHRVHTGEKPYKCEECDKVFSRKSTLERHRRIHTGEKPYKCKVCDKAFRRDSHLAQHIVIHTGEKPYKCNECGKTFVQIHLLVMHKVLHTGEKRYKCNECGKVFNHKSNLACHPXTSIPGRETFTRVMECGQGFNRKSNLERHHRLHTGKKSXKCEICKVFRQQSNLACHHRLYTGEKPYKCEECDKSFQFQITP

SEQ ID NO: 9879 - protein, 301 aa, Homo sapiens
  DOMAIN (80)..(123): Acyl-CoA dehydrogenases proteins domain identified by eMATRIX, accession number BL00072E, p-value=9.122e-10, raw score of 24.12
  DOMAIN (59)..(122): Acyl-CoA oxidase domain identified by PFam, accession name ACOX, E-value=1.5e-36, PFam score of 134.4
MTGGGFGGCTVTLLEASAAPHRMRHIQEHYGGLPPSTSLKQPMEPRCCACEAPPGQHTLHALTAGLKAFTSWTANTGIEACRMACGGHGYSHCSGLPNIYVNFTPSCTFEGENTVMMLQTARVGDNSIDCWKDARRLFQDGDKSRAPHDPILTDQTQEWSGSATFTSDGGIRLFYTDYSGKHHGKQSLTTAQVNVSKSDDTLKINGVEDHKTLFDGAGNTYQHVQQFIDEGNYTSGDNHTLRDPHYVEDKGQKYLVFEANTGTENGYQGEESLFNKAYSGGGTNFFRKESQKLQQSEERQK

SEQ ID NO: 9880 - protein, 90 aa, Homo sapiens
IADSVTPDDSSLKCPSLIFPRSFVHRGRPEPLDLHLGMFLPTLLHQATAEQQERFFMPAWNLEIIGTYAQTEMGHGMEYSVYLKEMGGPL

SEQ ID NO: 9881 - protein, 80 aa, Homo sapiens [sequence omitted]

SEQ ID NO: 9882 - protein, 728 aa, Homo sapiens
  DOMAIN (420)..(463): Acyl-CoA dehydrogenases proteins domain identified by eMATRIX, accession number BL00072E, p-value=9.122e-10, raw score of 24.12
  DOMAIN (201)..(710): Acyl-CoA oxidase domain identified by PFam, accession name ACOX, E-value=3.4e-245, PFam score of 827.9
  misc_feature (1)...(728): Xaa = X or * as defined in Table 2
RFRAGAADLDCHCHLGRCLLRCQLVVAMNPDLRRERDSASFNPELLTHTLDGSPEKTRRRREIENMILNDPDFQHEDLNFLTRSQRYEVAVRKSAIMVKKMREFGIADPDEIMWFKNFVHRGRPEPLDLHLGMFLPTLLHQATAEQQERFFMPAWNLEIIGHFIAQTEMGHGTHLSRLSETTATYDPETQEFILNSPTVTSIKWWPGGLGKTSNHAIVLAQLITKGKCYGLHAFIVPIREIGTHKPLPGITVGDIGPKFGYDEIDNGYLKMDNHRIPRENMLMKYAQVKPDGTYVKPLSNKLTYGTMVFVRSFLVGEAARALSKACTIGILYSAVRHHSEIKPGEPEPLILDFQTQQYKLFPLLATAYAFQFVGAYMKETYHRINEGIGQGDLSELPELHALTAGLKAFTSWTANTGIEACRMACGGHGYSHCSGLPNIYVNFTPSCTFEGENTVMMLQTARFLMKSYDQVHSGKLVCGMVSYLNDLPSQRIQPQQVAVWPTMVDINSPESLTEAYKLRAARLVEIAAKNLQKEVIHRKSKEVAWNLTSVDLVRASEAHCHYVVVKLFSEKLLKIQDKAIQAVLKESLCLLYSLYGISQNAGDFLQGSIMTGPQITPSNPAVXRELLTLIRSDAVALVDAFDFQDVTLGSVLGRYDGNVYENLFEWAKNSPLEPKAEVHGIFTRHLEVHCQSQALEVFTRDKFKSGFQKAPVWQLQILWESFSNSNRL

SEQ ID NO: 9883 - protein, 60 aa, Homo sapiens
ANLGPTAPPRSGPVLGAGEKGRGEMRRAPFFLSAGGLETPPPSAALLWAPGRRADEISGL

SEQ ID NO: 9884 - protein, 93 aa, Homo sapiens
ANLGPTAPPRSGPVLGAGEKGRGEMRRAPFFLSAGGLETPPPSAALLWAPGRRADEISGLWLLHTTAPQVGGELRDERRGQRQEKMLIKKDEN

SEQ ID NO: 9885 - protein, 119 aa, Homo sapiens
  misc_feature (1)...(119): Xaa = X or * as defined in Table 2
IGGPQGFSPTPSLKPRPRIFKTPPIRGNWGPRPPPGVSPQFQGFGGDTKFNLIEILFVVLTFSVXAQSGDPAAPPRSGPRPGGRGEREGXNEKSPVLPQCWGGWRHHPPSAALLWALIW

SEQ ID NO: 9886 - protein, 67 aa, Homo sapiens
  misc_feature (1)...(67): Xaa = X or * as defined in Table 2
TPSTIDKSLTSLIKKKKAXINNFRDKKGNIAKDIPEMXKIIREYYENIHANTFENLGDIDKNKIDQN

SEQ ID NO: 9887 - protein, 37 aa, Homo sapiens
KNGMNMSFSFSNYAQSSQFRTWQDSSVSYAAGALTVH

SEQ ID NO: 9888 - protein, 55 aa, Homo sapiens
  misc_feature (1)...(55): Xaa = X or * as defined in Table 2
MSIIEQLDSVSFSNYLKKYHNTICGRHPIGVLLNAITELQKNGMNMSFSXLNYAQ

SEQ ID NO: 9889 - protein, 177 aa, Homo sapiens
  misc_feature (1)...(177): Xaa = X or * as defined in Table 2
QQRWQQGWWQAWGGQPVPQEVGFWFLLSWLLSRLLGVPAQGPARGEVDPRPGSRGARGGCSASAAPPARASPGRPCCWNGSRPPAQHRRTSPATRVGEAGQGEVRGVRRLPAPLLQAVQPRLSDRSYPAAPARPTATSPAPPPSPAPKAPIVGALSXGTADPGSDSYPPSRSHAPRP

SEQ ID NO: 9890 - protein, 208 aa, Homo sapiens
  DOMAIN (1)..(186): Protein of unknown function DUF52 domain identified by PFam, accession name DUF52, E-value=0.00026, PFam score of -101.9
MAEKCTSQQKRTQNKHGSTGIKMSNRVVRWEASHSGNWYTASGPQLNAQLEDKDEHGIEMHLPCTAKAMEIHKDEFTIIPVLVGALSESKEQEFGKLFSKYLADPSNFFVVSSDFCHWGQRFRYSYYDESQGETYRSIEHLDKMARASPTSAAPCSTAPSPIDRPRAEECERMAQDWQAAPPAALVRDPLGEASWAPESGGDVENLYV

SEQ ID NO: 9891 - protein, 283 aa, Homo sapiens
  DOMAIN (20)..(279): Protein of unknown function DUF52 domain identified by PFam, accession name DUF52, E-value=2e-29, PFam score of 111.2
ARGTIGGTGTKMSNRVVCREASHAGSWYTASGPQLNAQLEGWLSQVQSTKRPARAIIAPRRIFILGPSHHVPLSRCALSSVDIYRTPLYDLRIDQKIYGELWKTGMFERMSLQTDEDEHSIEMHLPYTAKAMERCPVDVVMQILPKKPLHCRGTGDLYDLFISQLTGHKDEFTIIPVLVGALSESKEQEFGKLFSKYLADPSNLFVVSSDFCHWGQRFRYSYYDESQGEIYRSIEHLDKMAITELQKNGMNMSFSFLNYAQSSQCRNWQDSSVSYAAGALTVH

SEQ ID NO: 9892 - protein, 372 aa, Homo sapiens
  DOMAIN (160)..(356): Protein of unknown function DUF52 domain identified by PFam, accession name DUF52, E-value=0.0015, PFam score of -112.5
MQVPCDHHHWDCAGSDLKPAMHWTLSKALSLRVTRIRDALGVGTQKGCHTDSSLSCSALKPSVDGKAKRALFVTHAFWGSRGRGQLLDAAVGWLVFKFLLELYTGMSADEMICYSGKSTELSGKLVLNYVLTVMEGERSRGVRPQQGNDCDDGFLSLRLGPQLNAQLEGWLSQVQSTKRPARAIIAPVGWTSATHIQRTEYGKRKIATLQQTNLANTYYLNQTIKMQILPKKPLHCRGTGDLYDLFISQLTGHKDEFTIIPVLVGALSESKEQEFGKLFSKYLADPSNLFVVSSDFCHWVYGELWKTGMFERMSLQTDEDEHSIEMHLPYTAKAMERCPVDVVSRGPQLVRGLLGTGLCNRMRTVGQRALPT

SEQ ID NO: 9893 - protein, 449 aa, Homo sapiens
  DOMAIN (138)..(428): Protein of unknown function DUF52 domain identified by PFam, accession name DUF52, E-value=2.4e-72, PFam score of 253.8
  misc_feature (1)...(449): Xaa = X or * as defined in Table 2
HRCCLWTFQCLSISLGITFLIKEGKEGKLEPAREGPYLVLLTTETAVLLISITIPTTSNSNPTLERFCGLGAEVTGKDPMGFFKVLRQSLDADEGTAVDIQSFRPQKDFGRRRTLEECHVTGKGGTGTKMSNRVVCREASHAGSWYTASGPQLNAQLEGWLSQVQSTKRPARAIIAPHAGYTYCGSCAAHAYKQVDPSITRRIFILGPSHHVPLSRCALSSVDIYRTPLYDLRIDQKIYGELWKTGMFERMSLQTDEDERSIEMHLPYTAKAMESHKDEFTIIPLLVGALSESKEQEFGKLFSKYLADPSNLFVVSSDFCHWGQRFRYSYYDESQGEIYXSIEHLDKMGMSIIEQLDPVSFSNYLKKYHNTICGRHPIGVLLNAITELQKNGMNMSFSFLNYAQSSQCRNWQDSSVSYAAWEHSRATEALNPQGCHLPHSSYSVRGSPA

SEQ ID NO: 9894 - protein, 212 aa, Homo sapiens
  DOMAIN (106)..(120): VINCULIN SIGNATURE domain identified by eMATRIX, accession number PR00806B, p-value=4.240e-09, raw score of 4.28
  DOMAIN (44)..(160): Skp1 family domain identified by PFam, accession name Skp1, E -value=0.00052, PFam score of 10.7
  misc_feature (1)...(212): Xaa = X or * as defined in Table 2
SLPSLTPPGSRQPPAGRLLNTEHHINEHILMYSLDLNSSSQMPSIKAQTSDGEIFEVDGEMPNHLLPIKAHVEDLGMDDEGDDDPVPLPNVNAAILKKVIQWCTHPHKDDPPPPEDDEEQRKSVPDDIPVWDQGIPGKFDQGTLFXNSFLGLQTYFRTSKGLLDVTCKTVCQYDQKGKLPXEIRKPFPKSKMTFTEEEEAQVRKENQWCEEK

SEQ ID NO: 9895 - protein, 120 aa, Homo sapiens
  misc_feature (1)...(120): Xaa = X or * as defined in Table 2
WVRRGTISPARQRQDGVGAAPANYAKVLEWQLAPSPRHKCQQRPGTHLGCDSIGPLSPVGLPGLKGXPDNSSEGCPSSQALPVPSSPGHPGSGGPKGQARSLLNCRGCPINWQHRCCRKI

SEQ ID NO: 9896 - protein, 396 aa, Homo sapiens
  DOMAIN (86)..(111): Mitochondrial energy transfer proteins domain identified by eMATRIX, accession number BL00215A, p-value=3.368e-13, raw score of 15.82
  DOMAIN (84)..(263): Mitochondrial carrier proteins domain identified by PFam, accession name mito_carr, E-value=4.8e-37, PFam score of 129.9
  misc_feature (1)...(396): Xaa = X or * as defined in Table 2
QPFQGSGCVIAILGRKMFSSVAHLARANPFNTPHLQLVHDGLGDLRSSSPGPTGKPRRPRNLAAAAVEEQYSCDYGSGRFFILCGLGGIISCGTTHTALVPLDLVKCRMKVDPQKYKGIFNGFSVTLKEDGVRGLAKGLAPTFLGYSMQGLCKFGFYEVFKVLYSNMLGEENTYLWRTSLYLAASASAEFFADIALAPMEAAKVRIQTQPGYANTXEGISFPKCIKEKGLKAFYKGVALLWMRQITYTMNXSSPCLERTVXSHCTSLGVPKPRSECSKPEQTGCNHLVAGYIARVFCAIVSHPCXFVWYLVLNKEXSVAVSLLVFSVTLDFKGVWKGLFARIIMIGTLTALQWFIYYSVKGYFRTLPRPPPPRDGQSLLNNKFGLTPVVRSKQIVD

SEQ ID NO: 9897 - protein, 150 aa, Homo sapiens
  misc_feature (1)...(150): Xaa = X or * as defined in Table 2
CFGFVFPRSWPYGPLSTGDVPKLGPPNXAMGGFRPGKPQVSLPGFAGGHACSPASLPSGPGPAPPRACLPSPRGGRKSLGAPGGFPPGDSHGAPCSRVVTVSPGNDLKPGHSPRTLQRGGSLPGRRWVWSCGVVCPVWWPVLSASISGWI

SEQ ID NO: 9898 - protein, 192 aa, Homo sapiens
  misc_feature (1)...(192): Xaa = X or * as defined in Table 2
VPEALSPFEMEGPQFPTMCCCSAPPAMPFPTTXQPSEAAAGQGVPGPHRLXGGLAPAGRSXAPAGAFWGQGPAQRGEPAYSSKGGAAASTQRVLXHRRGHRGDASRGCQPGDQNLQXKLCSSRAEGGAVSQPGWPALPHAAGEPLASALPGLHAAQAPAPAVVSGPTTIRSCSGNSGKIFPSSCLDSCFPPS

SEQ ID NO: 9899 - protein, 311 aa, Homo sapiens
MLGAIILSKLTGTENQIPHVVIHKWQLNDESTWTQSGEQQTPGPVGGEIDLQILSKVQAQYPGVCINNEVVEPSAEQIAKYKELVAKTSNLENVKFAWHKETSSEYQSRMLEKKELQKWDFIHMIQMLYYVKDIPATLKFFHSLLGTNAKMLIIVVSAHWSVGPTPTYPPGDYSSLLAVLPTSALMRQYSLPIGSSGWDKLWKKYGSRFPQDDLCQYITSDDLTQMLDNLGLKYECYDLLSTMDISDCFIDGNENGDLLWDFLTETCNFNATAPPDLRAELGKDLQEPEFSAKKEGKVLFNNTLSFIVIEA

SEQ ID NO: 9900 - protein, 196 aa, Homo sapiens
  misc_feature (1)...(196): Xaa = X or * as defined in Table 2
QEYRPSQTPHLALSPERVAPGRRAAGRLAPEARAPRGSPLPPHRVSEKTIRVVVFHPGARKAGGTPPRAPRGDTGGAPGAPTYSTPLMSLHRARLESSSTGSSFPADSAKPVPLAVVSLDSRXGQWESRSSIHAVTNXASSSSSSSSSSSFSRVYPRFIEFLHFDIQSTGQRITSRQHPPRDLRDALFXLNSRIPL

SEQ ID NO: 9901 - protein, 44 aa, Homo sapiens
ELGTQLRTCTTLSGLASQVEAHHSLVLSHLKTLLWKKISNTKYS

SEQ ID NO: 9902 - protein, 515 aa, Homo sapiens
  misc_feature (1)...(515): Xaa = X or * as defined in Table 2
MRREGFKFSRSKVFVQDEMTKKWHKSDLHWVSRIQCTVLGVLTNATEMRSLLPIESLFLIQCFVVSGASRNEATDCSGECYSSMRETRGSKECAAARFIKVKGKVLQKVESYKLYHPYFLANWFSASFSKVGKLVEMRGQEEETLGTFAHVLMFQAASSRALVLPPTMQLELQNFGNTCSYRKPNMASSMRSLFSDHGKYVESFRRFLNHSTEHQCMQEFMDKKLPGIIGRIGDTKSEIKILSIGGGAGEIDLQILSKVQAQYPGVCIQHXSCLRPSAGTNWPNYKELVAKTSNLENVKFAWHKETSSEYQSRMLGEKGAFKSWDFYSIXFKMLYYVKDIPATLKFFHSLLGTNAKMLIIVCVQGSSGWDKLWKKYGSRFPQDDLCQYITSDDLTQMLDNLGLKYECYDLLSTMDISDCFIDGNENGDLLWDFLTETCNFNATAPPDLRAELGKDLQEPEFSALRKEGKVLFNNTLSFIVIEGITIQSQKYIQKLYFEQLESLIYFHIKITNSSH

SEQ ID NO: 9903 - protein, 2250 aa, Homo sapiens
  DOMAIN (660)..(705): kw TRANSCRIPTASE REVERSE II ORF2 domain identified by eMATRIX, accession number DM01354N, p-value=1.000e-40, raw score of 13.17
  DOMAIN (744)..(1019): Reverse transcriptase domain identified by PFam, accession name rvt, E-value=6.7e-85, PFam score of 295.5
MPTSESEGGSGTQACRKTQPNIHDYYWNGIGVEDWIAAERWIKFRFQTMDGDWENSVSWADDENEASIGSWSGASDKAGIIRSWAVACDETSVKSWAGARAENVVGIGTWARAGEQASGGLWAGGQTSEGTWAGDKASGGAWTGAENQASGGSWALAGNQAIGELWAAGQASDGSWPGGQASGVSWVGEEAIGGSWTGAENQASEGSWAGAGAGNMSSVSYWAGVVDQAGGGSWAGTNDPFGVRLHRTRNKEVMKAVALFTIAPVNLLKKHRLANWIKSQDPSVRCIQETHLTCRDTHRLKIKGWRKIYQANGKQKKAGVAILVSDKTDFKPTKIKRDKEGHYLMVKGSIQQEELTILNIYAPNSGAPRFIKQVLSDLQRDLDSHTLIMGDFNTLLSTLDRSTRQKVNKDTQELNSALHKVDLIDNYRTLHPKSTEYTFFSAPHHTYSKIDHILGSKALLSKCKRTEIITNYLSDHSAIKLELRIKNLTQNRSTTWKLNNLLLDDYWVHNEMKAEIKMFFETSENKGTTYQNLWDTYKAVCRGKFIALNAHKRKQERSKIDTLTSQLKELEKQEQTHSKASRRQEITKIRAELKEIETQKTLQKINESRSWFFERINKIDRPLARLIKKKREKNQIDAIKNDKGDITTDPTEIQTTIREYYKHLYANKLENLEEMDKFLDTYTLPRLNQEEVESLNRPITGAEIVAIINSLPTKKSPGPDGFTAEFSQRYKEELVPFLLKLFQSIEKEGILPNSFYEASIILIPKPGRDTTKKENFRPISLMNIDAKILSKILAKRIQQHIKKLIHHDQVGFIPGMQGWFNIHKSINVIQHINRAKDKNHMIISIDAEKAFDKIQQPFMLKTLNKLGIDGTYFKIIGAIYDEPTANIILNGQKLEAFPLKTGTRQGCPLSPLLLNIVLEVLARAIRQEKEIKGIQLGKEEVKLSLFADDMIVYLENPIVSAQNLLKLISNFSKVSGYKINVQKSQAFLYTNNRQTESQIMSELPFTIASKRIKYLGIQLTRDVKDLFKENYKPLLKEIKEDTNKWKNIPCSWVGRINIVKMAILPKGVLGRRASSAVTRGPHVTRSCRATQPSLQSSLASGYQLPAALRSAGWHRARGKRSRSACMSAAGLKITGSKETKRRLLLISIDWSRDLMNLCIYFRVYCQEKQEERRELPRIITGPPPEAAVVAFEWLKTSTLTGLHPQLPLSLPQPECALPYLVRAFSRGDYMGRIQEVGWVTAGLVIWAGTCYYIYKFTKGRAQSVRTLARNGSTVKMETVVGVQSQTLAINEAEIKTKPQVEIGAETGARSGPRAEVETKATAIAIHRANSQAKAMVGAEPETQSESKVVAGTLVMTEAVTLTEVKAKAREVAMKEAVTQTDAEAGKIVKKEAVTQTKAKAWALVAKTEAKREAMTQTKAETHILAEKETEINRVMVTQSETLAVPREVAKMGATNKTGIVDETKTRALEETVSVAKTQSEARPGATVDARGNPNGMSREVAGVDMKSCAQSQAVTKIQGDDMPGTGVEDMGNCKTMSRAESGADTRASAQPQIFAKTQTEAIPGAKIDAGGNTNAMWKIPMSYLKAITGADMRAAAQPQAVASTHAEAMSDAKVKNRGNPNAMTKAGAKANLRANSQVEALPDARDKSRGNPNVMAKVGDGTDMLSCTQPQLVASVQADTLSDGKIKVRGNVNSMPKEGAGVDMKAQDDNRRVSQVASVKSTDGKTEDRTLRKPSTCGALAENSAELKPRLELPSTIKACEVTTLTHKLWDNSVKAGTLITKLFLSSAQSMKIFCCLWNFVYKQLEDAAQGLTMGGDVEEHESRLGAGEEAGVESWTLARNVGEDELSRESSPDIEEISLRSLFWAESENSNTFRSKSGKDASFESGAGDNTSIKDKFEAAGGVDIGSWFCAGNENTSEDKSAPKAKAKKSSESRGIYPYMVPGAGMGSWDGAMIWSETKFAHQSEASFPVEDESRKQTRTGEKTRPWSCRCKHEANMDPRDLEKLICMIEMTEDPSVHEIANNALYNSADYSYSHEVVRNVGGISVIESLLNNPYPSVRQKALNALNNISVAAENHRKVKTYLNQVCEDTVTYPLNSNVQLAGLRLIRHLTITSEYQHMVTNYISEFLRLLTVGSGETKDHVLGMLLNFSKNPSMTKDLLIANAPTSLINIFSKKETKENILNALSLFENINYHFKRRAKAFTQDKFSKNSLYFLFQRPKACAKKLRALAAECNDPEVKERVELLISKL

SEQ ID NO: 9904 - protein, 29 aa, Homo sapiens
  misc_feature (1)...(29): Xaa = X or * as defined in Table 2
KKNINXEILNXKQMEEPTLYVGNFPIQLT

SEQ ID NO: 9905 - protein, 2499 aa, Homo sapiens
GAGEEGELGGDARSSRDPELQSYAAFVAVVTRIWLPAPRCPALGGLASGPGKAEQFSRSLYLPDHLGEGNGGLLGKSLEPYRSACMSAAGLKITGSKETKRRLLLISIDWSRDLMNLCIYFRVYCQEKQEERRELPRIITGPPPEAAVVAFEWLKTSTLTGLHPQLPLSLPQPECALPYLVRAFSRGDYMGRIQEVGWVTAGLVIWAGTCYYIYKFTKGRAQSVRTLARNGSTVKMETVVGVQSQTLAINEAEIKTKPQVEIGAETGARSGPRAEVETKATAIAIHRANSQAKAMVGAEPETQSESKVVAGTLVMTEAVTLTEVKAKAREVAMKEAVTQTDAEAGKIVKKEAVTQTKAKAWALVAKTEAKREAMTQTKAETHILAEKETEINRVMVTQSETLAVPREVAKMGATNKTGIVDETKTRALEETVSVAKTQSEARPGATVDARGNPNGMSREVAGVDMKSCAQSQAVTKIQGDDMPGTGVEDMGNCKTMSRAESGADTRASAQPQIFAKTQTEAIPGAKIDAGGNTNAMCKVGAGADVRACIQPQTVAKKQAEVTSGARVDGRGNTNVISKAITGADMRAAAQPQAVASTHAEAMSDAKVKNRGNPNAMTKAGAKANLRANSQVEALPDARDKSRGNPNVMAKVGDGTDMLSCTQPQLVASVQADTLSDGKIKVRGNVNTMPKEGAGVDMKAQGMAQSQGEALPNTRGKARGKAKAKCKTGPGMDMKTCTQPQAGVKTPAEALLDSRVDGRGNPNATSKAGTKADQRVCGQPLVVANPQGEALPGAKNKVKGNPHTVLKVGAGEGTTDSAQPEAVVSFQGEALLGTKNKVKGNPNVVLKAEVGEGAMGTAQLQIMASSKGEALLDSKNKVKGNSNAVSKAGAGTDTTGSVQPQIVANSQGEVLPGAKNKIRGNPTTVPNSGVGPYTTDSARLQAVANSQGEVLPGAKNKVKANLNAVSKAEAGMGATGSVQPQAVANSHCETLPGAKNKVRGNWNAVSKAGAGMDTRGSAQPQAVANSQGEVLPGAKNKVKGNPNVVSKAGAREDTVGSTQPQVLASSQRETLPGARNKVKGNSNVVSKAGAREDTMGSAQPQVVANSQRETLPGARNKVKGNSNAISKAEAGAGIMGSVQVQVVASFQGEVLPGAKNKVRGNSNAVPKAEAGADTVGSAQPQAVANSQSETLLGARNKVKGNTIAVPKAGTGAGTRHSAQPQIVAGSQGETLPGARDKSMSTSEAEATAEDEAYAKPEAEAMPTSESEGGSGTQACRKTQPNIHDYYWNGIGVEDWIAAERWIKFRFQTMDGDWENSVSWADDENEASIGSWSGASDKAGIIRSWAVACDETSVKSWAGARAENVVGIGTWARAGEQASGGLWAGGQTSEGTWAGDKASGGAWTGAENQASGGSWALAGNQAIGELWAAGQASDGSWPGGQASGVSWVGEEAIGGSWTGAENQASEGSWAGAGAGNMSSVSYWAGVVDQAGGGSWAGTSDQSGGGSKPRFEDQASGEGSWAGAGGQASGGSMLGPEDQSSGRSWADTADQASGGSRLGHVDQSSGGAWAGTLDQSGGGSKPRFENQTTEEGSWAGAGGQAGGGSKVGPEDQSSGRSWANSGDQISGGFLVGIVDQANGGSWTGAGHPASVGPKPIFEDQVSGRGSWADAREQVVGDSRLGLRDQSSGDSWADTGDQASGWFCVCPGSQTNGGSWGGASGQDVGGSRPGPTNQSSAGSWDSPGSQVSGSCWTGAGAVDQAGGCSKPGFEDQAIGGGFWPGAGDQTGGGSRPGSEDQSSGIGSWGVAGGQVLGGARPGPADQSSGGSWAGTGNQSSGRSWIGPGDQAVDCSKPEFEDQACGGGSWAGAGSQASGESWAGSRPGNEAIGGSRMGSEDQATGGSWARSEDQASGRFQVSFEVEANEGFWFGPGAEAVIGSWCWTEEKADIVSRPDDKDEATTASRSGAGEEAMICSRIEAENKASSGSWIRSEEVAYMGSCVGAEAGAGAEAGAGAEAGAGAGAEAGAEAGAGAGAGPGTESGAGIWSWDGDATTVESRLGAGEEAGVESWTLARNVGEDELSRESSPDIEEISLRSLFWAESENSNTFRSKSGKDASFESGAGDNTSIKDKFEAAGGVDIGSWFCAGNENTSEDKSAPKAKAKKSSESRGIYPYMVPGAGMGSWDGAMIWSETKFAHQSEASFPVEDESRKQTRTGEKTRPWSCRCKHEANMDPRDLEKLICMIEMTEDPSVHEIANNALYNSADYSYSHEVVRNVGGISVIESLLNNPYPSVRQKALNALNNISVAAENHRKVKTYLNQVCEDTVTYPLNSNVQLAGLRLIRHLTITSEYQHMVTNYISEFLRLLTVGSGETKDHVLGMLLNFSKNPSMTKDLLIANAPTSLINIFSKKETKENILNALSLFENINYHFKRRAKAFTQDKFSKNSLYFLFQRPKACAKKLRALAAECNDPECLEAAETAAGNSAQGKFYKGGGPLGVDPKSIP

SEQ ID NO: 9906 - protein, 1072 aa, Homo sapiens
  misc_feature (1)...(1072): Xaa = X or * as defined in Table 2
PPPEAAVVAFEWLKTSTLTGLHPQLPLSLPQPECALPYLVRAFSRGDYMGRIQEVGWVTAGLVIWAGTCYYIYKFTKGRAQSVRTLARNGSTVKMETVVGVQSQTLAINEAEIKTKPQVEIGAETGARSGPRAEVETKATAIAIHRANSQAKAMVGAEPETQSESKVVAGTLVMTEAVTLTEVKAKAREVAMKEAVTQTDAEAGKIVKKEAVTQTKAKAWALVAKTEAKREAMTQTKAETHILAEKETEINRVMVTQSETLAVPREVAKMGATNKTGIVDETKTRALEETVSVAKTQSEARPGATVDARGNPNGMSREVAGVDMKSCAQSQAVTKIQGDDMPGTGVEDMGNCKTMSRAESGADTRASAQPQIFAKTQTEAIPGAKIDAGGNTNAMWKIPMSYLKAITGADMRAAAQPQAVASTHAEAMSDAKVKNRGNPNAMTKAGAKANLRANSQVEALPDARDKSRGNPNVMAKVGDGTDMLSCTQPQLVASVQADTLSDGKIKVRGNVNSMPKEGAGVDMKAQDDNRRVSQVASVKSTDGKTEDRTLRKPSTCGALAENSAELKPRLELPSTIKACEVTTLTHKLWDNSVKAGTLITKLFLSSAQSMKIFCCLWNFVYKQLEDAAQGLTMGGDVEEHESRLGAGEEAGVESWTLARNVGEDELSRESSPDIEEISLRSLFWAESENSNTFRSKSGKDASFESGAGDNTSIKDKFEAAGGVDIGSWFCAGNENTSEDKSAPKAKAKKSSESRGIYPYMVPGAGMGSWDGAMIWSETKFAHQSEASFPVEDESRKQTRTGEKTRPWSCRCKHEANMDPRDLEKLICMIEMTEDPSVHEIANNALYNSADYSYSHEVVRNVGGISVIESLLNNPYPSVRQKALNALNNISVGSENHRKVKTYLNQVCEDTVTYPLNSNVQLAGLRLIRHLTITSEYQHMGYKLLFQDFFVCXRWGSGRNLKDPVLGMLLNFSKNPSMTKELLIANAPTYLGNIFSKKETKENILNALSLFENINYHFKRRAKAFNPRDKFSKNSLYFLFQRPKACAKKLRALAAECNDPEVKERVELLISKL

SEQ ID NO: 9907 - protein, 125 aa, Homo sapiens
  misc_feature (1)...(125): Xaa = X or * as defined in Table 2
NYFLSLRFDWHSSKSXGHPTCVHCFXTKNECASCHCGAGLLGFLGGSGEGASHPCPSCLPLEVRSLHCSLGHCGECMPGASGWGPWTGPGHCPNLCQDKGSKRISWRVGRNGWGRPSFDNAPVAL

SEQ ID NO: 9908 - protein, 208 aa, Homo sapiens
  DOMAIN (77)..(89): Snake toxins proteins domain identified by eMATRIX, accession number BL00272C, p-value=7.907e-09, raw score of 8.27
  misc_feature (1)...(208): Xaa = X or * as defined in Table 2
AGQNGVSGSAERCLSCLLIPLALWSIIENILLYIPNGHTFYASSNKLTNYVWYSERIXLSGIMMLIVTTVLLVLENNNNYKCCQSENCSKKYVTLLSIIFSSLGIAFSGYCLVISALGSCPXAICLAPLMGWGVCFXRALLGRFLTDSSIWDSVPGNLAHVVEWNIILFSILITLSGVQVIICLIRVVMQLSKILCGSYSVIFQPGII

SEQ ID NO: 9909 - protein, 1094 aa, Homo sapiens
  DOMAIN (960)..(1008): Receptor tyrosine kinase class III proteins domain identified by eMATRIX, accession number BL00240F, p-value=6.000e-32, raw score of 17.74
  DOMAIN (795)..(1059): Eukaryotic protein kinase domain identified by PFam, accession name pkinase, E-value=4.1e-66, PFam score of 233.1
MVWRVPPFLLPILFLASHVGAAVDLTLLANLRLTDPQRFFLTCVSGEAGAGRGSDAWGPPLLLEKDDRIVRTPPGPPLRLARNGSHQVTLRGFSKPSDLVGVFSCVGGAGARRTRVIYVHNSPGAHLLPDKVTHTVNKGDTAVLSARVHKEKQTDVIWKSNGSYFYTLDWHEAQDGRFLLQLPNVQPPSSGIYSATYLEASPLGSAFFRLIVRACREGRFGQSCQEQCPGISGCRGLTFCLPDPYGCSCGSGWRGSQCQEACAPGHFGADCRLQCQCQNGGTCDRFSGCVCPSGWHGVHCEKSDRIPQILNMASELEFNLETMPRINCAAAGNPFPVRGSIELRKPDGTVLLSTKAIVEPEKTTAEFEVPRLVLADSGFWECRVSTSGGQDSRRFKVNVKVPPVPLAAPRLLTKQSRQLVVSPLVSFSGDGPISTVRLHYRPQDSTMDWSTIVVDPSENVTLMNLRPKTGYSVRVQLSRPGEGGEGAWGPPTLMTTDCPEPLLQPWLEGWHVEGTDRLRVSWSLPLVPGPLVGDGFLLRLWDGTRGQERRENVSSPQARTALLTGLTPGTHYQLDVQLYHCTLLGPASPPAHVLLPPSGPPAPRHLHAQALSDSEIQLTWKHPEALPGPISKYVVEVQVAGGAGDPLWIDVDRPEETSTIIRGLNASTRYLFRMRASIQGLGDWSNTVEESTLGNGLQAEGPVQESRAAEEGLDQQLILAVVGSVSATCLTILAALLTLVCIRRSCLHRRRTFTYQSGSGEETILQFSSGTLTLTRRPKLQPEPLSYPVLEWEDITFEDLIGEGNFGQVIRAMIKKDGLKMNAAIKMLKEYASENDHRDFAGELEVLCKLGHHPNIINLLGACKNRGYLYIAIEYAPYGNLLDFLRKSRVLETDPAFAREHGTASTLSSRQLLRFASDAANGMQYLSEKQFIHRDLAARNVLVGENLASKIADFGLSRGEEVYVKKTMGRLPVRWMAIESLNYSVYTTKSDVWSFGVLLWEIVSLGGTPYCGMTCAELYEKLPQADRMEQPRNCDDEVYELMRQCWRDRPYERPPFAQIALQLGRMLEARKAYVNMSLFENFTYAGIDATAEEA

SEQ ID NO: 9910 - protein, 104 aa, Homo sapiens
PRCPHNLPLSLCPGLQAEGPVQESRAAEEGLDQQLILAVVGSVSATCLTILAALLTLVCIRRSCLHRRRTFTYQSGSAFLGSGASLCLHTSLADVLSPAVATCQ

SEQ ID NO: 9911 - protein, 1190 aa, Homo sapiens
  DOMAIN (1058)..(1074): Protein kinases ATP-binding region proteins domain identified by eMATRIX, accession number BL00107B, p-value=6.400e-14, raw score of 13.31
  DOMAIN (464)..(747): Fibronectin type III domain identified by PFam, accession name fn3, E-value=2.4e-47, PFam score of 170.7
  misc_feature (1)...(1190): Xaa = X or * as defined in Table 2
SSDPRPSSFWLVWVGLWSMVWRVPPFLLPILFLASHVGAAVDLTLLANLRLTDPQRFFLTCVSGEAGAGRGSDAWGPPLLLEKDDRIVRTPPGPPLRLARNGSHQVTLRGFSKPSDLVGVFSCVGGAGARRTRVIYVHNSPGAHLLPDKVTHTVNKGDTAVLSARVHKEKQTDVIWKSNGSYFYTLDWHEAQDGRFLLQLPNVQPPSSGIYSATYLEASPLGSAFFRLIVRGCGAGRWGPGCTKECPGCLHGGVCHDHDGECVCPPGFTGTRCEQACREGRFGQSCQEQCPGISGCRGLTFCLPDPYGCSCGSGWRGSQCQEACAPGHFGADCRLQCQCQNGGTCDRFSGCVCPSGWHGVHCEKSDRIPQILNMASELEFNLETMPRINCAAAGNPFPVRGSIELRKPDGTVLLSTKAIVEPEKTTAEFEVPRLVLADSGFWECRVSTSGGQDSRRFKVNVKVPPVPLAAPRLLTKQSRQLVVSPLVSFSGDGPISTVRLHYRPQDSTMDWSTIVVDPSENVTLMNLRPKTGYSVRVQLSRPGEGGEGAWGPPTLMTTDCPEPLLQPWLEGWHVEGTDRLRVSWSLPLVPGPLVGDGFLLRLWDGTRGQERRENVSSPQARTALLTGLTPGTHYQLDVQLYHCTLLGPASPPAHVLLPPSGPPAPRHLHAQALSDSEIQLTWKHPEALPGPISKYVVEVQVAGGAGDPLWIDVDRPEETSTIIRGLNASTRYLFRMRASIQGLGDWSNTVEESTLGNGLQAEGPVQESRAAEEGLDQQLILAVVGSVSATCLTILAALLTLVCIRRSCLHRRRTFTYQSGSGEETILQFSSGTLTLTRRPKLQPEPLSYPVLEWEDITFEDLIGEGNFGQVIRAMIKKDGLKMNAAIKMLKEYASENDHRDFAGELEVLCKLGHHPNIINLLGACKNRGYLYIAIEYAPYGNLLDILRKSRVLETDPAFAREHGTASTLSAPRQLLRFASDAANGMQLPGVRKAVHSTGDLGLARECCWSGENLGLQDLQTFGLFSRGEEVYVKKTMGRLPVRWMAIESLNYSVYTTKSDVWSFGVLLWEIVSLEGTPYCGMTCAEALMKSLPQGYPHGSKPRNCDDEVYELMRQCWRDRPYERPPFAQIALQLGRMLEAREGPMXNHVAVXKTFTYAGNXMPTAEEGPEAAHPSPEPWVLLAGSKTLLS

SEQ ID NO: 9912 - protein, 96 aa, Homo sapiens
  misc_feature (1)...(96): Xaa = X or * as defined in Table 2
WTSSVSTGQSDQAGPAPALIQMQRPGCGPSPVPGGWLEXRDGQAGMGAAAAPAWVLLCIPAGQGPLPGPRLPFHIPILKFCYCGILVEKKEPRGCF

SEQ ID NO: 9913 - protein, 67 aa, Homo sapiens
  DOMAIN (35)..(60): 14-3-3 PROTEIN ZETA SIGNATURE domain identified by eMATRIX, accession number PR00305B, p-value=5.800e-21, raw score of 9.99
  DOMAIN (8)..(66): 14-3-3 proteins domain identified by PFam, accession name 14- 3-3, E-value=2.3e-21, PFam score of 79.5
  misc_feature (1)...(67): Xaa = X or * as defined in Table 2
MEKTELIRRSAWRVISSIEQKTDTSDKKLQLIKDYREKVESELRSICTTVLELLDKYLIANATNPEX

SEQ ID NO: 9914 - protein, 305 aa, Homo sapiens
  DOMAIN (86)..(119): 14-3-3 proteins domain identified by eMATRIX, accession number BL00796B, p-value=1.632e-25, raw score of 10.67
  DOMAIN (52)..(305): 14-3-3 proteins domain identified by PFam, accession name 14- 3-3, E-value=2.3e-69, PFam score of 243.9
  misc_feature (1)...(305): Xaa = X or * as defined in Table 2
KAKSRSKEVGLASRPRRRGSSRGSSRCGSALALALLALRPGPGPGPAPAMEKTELIQKAKLAEQAESRYDDMATCMKAVTEQGAQSLSNEERNLLSVAYKNVVGGRRSAWRVISKHPSRKTDTSDKKLQLIKDYREKVDSELRSICTTVLGICLDKYFILANGNLIPESKVFYLKMKGXFTFRYLCLEVACCDDRKQTIDNSQGAYQEAFDISKKEMQPTHPIRLGALLLTFSVFYYEILNNPEACLHAWLKTAFXWRAIAXLDTLNEDSYKDSTLIMQLLRDNLPLWTSDSAGEECDAAEGAEN

SEQ ID NO: 9915 - protein, 29 aa, Homo sapiens
  misc_feature (1)...(29): Xaa = X or * as defined in Table 2
PPSPLNSSTCCLAKTDEKXCKEKGSHLLH

SEQ ID NO: 9916 - protein, 724 aa, Homo sapiens
  DOMAIN (6)..(45): PROTEIN ZINC FINGER ZINC-FINGER METAL-BINDING NU domain identified by eMATRIX, accession number PD01066, p-value=7.923e-33, raw score of 19.43
  DOMAIN (210)..(599): Zinc finger, C2H2 type domain identified by PFam, accession name zf-C2H2, E-value=3.1e-95, PFam score of 329.8
  misc_feature (1)...(724): Xaa = X or * as defined in Table 2
QGPLKFMDAGIEFSQDEWKCLDPAQRTLYRDVMLENYRNLVSLGICLPDLSVTSMIEQKRDPWTLQSEEKIANDPDGRECIKGVNTERSSKLGSNAGNKPCKNQLGFTFQLHLSDLQLFQAERKISGCKHFEKPVSDNSSVSPLEKISSSVKSHLLNKYRNNFDHAPLLPQEQKAHIREKAYKCNEHGQVFRASASLTNQVIHNADNPYKCSECGKVFSCSSKLVIHRRMHTGEKPYKCHECGKLFSSNSNLSQHQRIHTGEKPYKCHECDKVFRSSSKLAQHQRIHTGEKPYKCHECDKVFNQIAHLVRHQKIHTGEKPYSCNKCGKVFSRHSYLAEHQTVHTGEKPYKCEECGKAFSVRSSLITHQLIHTGRKPYKCKECDKVFGRKCFLTSHQRIHTRERPYGCSQCGKIFSQKSDLXRHRKTHTDEKPYNGNKCGTAFREFSDLTAHFLIHSGEKPYECKECGKVFRYKSSLTSHHRIHTGEKPYQMCNRCGKVFSRSSNLVCHQKIHTGEKPYKCNQCGKVFNQASYLTRHQIIHTGERPYRCSKCGKAFRGCSGLTAHLAIHTEKKSHECKECGKIFTQKSSLTNHHRIHIGEKPYKCTLCSXGLSVTILTLHSFRGFHHEGPYKLCDGKTIIMSSSINQHQXVHTKWKSYKXNVCDTGFIKACQITGHHHITVEDESTQMNCVYLGYYSRTIAIEHDRIYTRSNSVSGSLILIYDIA

SEQ ID NO: 9917 - protein, 233 aa, Homo sapiens
  misc_feature (1)...(233): Xaa = X or * as defined in Table 2
EPIPVTPDHRLVTMTHIVANLLSCQQRPRLPNYEMLKEEQEVAKLGAPQKPCLPECPPVIHIRNETSWPDHVRLVPVQHPLHEHLLRLGFIRFAYSVKSLRDRKMVGEVNRGPKAXCLHRQSAXKIWGPDFGHLHEPILAHQSSPPKFWVVPGPAIDREASLRPGALPVTCIPRTLSSIPRPAPRGQEVLPLTCIPLTPPSIPRPVPTAESCISPLSSHAFLQWHSIKCICFW

SEQ ID NO: 9918 - protein, 292 aa, Homo sapiens
  DOMAIN (14)..(41): NNMT/PNMT/TEMT family of methyltransferases proteins domain identified by eMATRIX, accession number BL01100A, p-value=1.947e- 24, raw score of 12.62
  DOMAIN (3)..(292): NNMT/PNMT/TEMT family domain identified by PFam, accession name NNMT_PNMT_TEMT, E-value=6.7e-14, PFam score of 47.5
  misc_feature (1)...(292): Xaa = X or * as defined in Table 2
DIMESGFTSKDTYLSHFNPRDYLEKYYKFGSRHSAESQILKHLLKNLFKIFCLDGVEGETCLIDIGFWAPLILSSSSSCFVESFXGRIVRSLDYFRTQEPGRELGRKWLEGKEARGLFDWVPPMVTPMCLNLERETEVKGPRRRRKKLKQAVKARCLKMXMXTQKPSHLGAVPLPPGXTAVPQAHLCLGCPPCPRPPQPTCKGASGTLGQPYLKPRGPSLVIMDAAQEQPTYMIGEQKFSSLPLGREAVKAAVKEAGYTIEWFEVISQSYSSTMANNEGLFSLVARKLSRPL

SEQ ID NO: 9919 - protein, 512 aa, Homo sapiens
  DOMAIN (370)..(418): Guanylate kinase proteins domain identified by eMATRIX, accession number BL00856C, p-value=1.871e-31, raw score of 29.21
  DOMAIN (346)..(450): Guanylate kinase domain identified by PFam, accession name Guanylate_kin, E-value=3.8e-37, PFam score of 136.8
MENPIVKSLAKARERLEDSKLEAVSDNNLELVNEILEDITPLINVDENVAELVGILKEPHFQSLLEAHDIVASKCYDSPPSSPEMNNSSINNQLLPVDAIRILGIHKRAGEPLGVTFRVENNDLVIARILHGGMIDRQGLLHVGDIIKEVNGHEVGNNPKELQELLKNISGSVTLKILPSYRDTITPQQVFVKCHFDYNPYNDNLIPCKEAGLKFSKGEILQIVNREDPNWWQASHVKEGGSAGLIPSQFLEEKRKAFVRRDWDNSGPFCGTISSKKKKKMMYLTTRNAEFDRHEIQIYEEVAKMPPFQRKTLVLIGAQGVGRRSLKNRFIVLNPTRFGTTVPFTSRKPREDEKDGQAYKFVSRSEMEADIKAGKYLEHGEYEGNLYGTKIDSILEVVQTGRTCILDVNPQALKVLRTSEFMPYVVFIAAPELETLRAMHKAVVDAGITTKLLTDSDLKKTVDESARIQRAYNHYFDLIIINDNLDKAFEKLQTAIEKLRMEPQWVPISWVY

SEQ ID NO: 9920 - protein, 580 aa, Homo sapiens
  DOMAIN (429)..(477): Guanylate kinase proteins domain identified by eMATRIX, accession number BL00856C, p-value=3.903e-31, raw score of 29.21
  DOMAIN (405)..(510): Guanylate kinase domain identified by PFam, accession name Guanylate_kin, E-value=1.7e-33, PFam score of 124.7
  misc_feature (1)...(580): Xaa = X or * as defined in Table 2
EFVLNYEPRVCRWGCSAAPVAEGEQRRRGATGSGGSGGAEAAEVRAAMQQVLENLTELPSSTGAEEIDLIFLKGIMENPIVKSLAKAHERLEDSKLEAVSDNNLELVNEILEDITPLINVDENVAELVGILKEPHFQSLLEAHDIVASKCYDSPPSSPEMNNSSINNQLLPVDAIRILGIHKRAGEPLGVTFRVENNDLVIARILHGGMIDRQGLLHVGDIIKEVNGHEVGNNPKELQELLKNISGSVTLKILPSYRDTITPQQVFVKCHFDYNPYNDNLIPCKEAGLKFSKGEILQIVNREDPNWWQASHVKEGGSAGLIPSQFLEEKRKAFVRRDWDNSGDELDTIKFDRHEIQIYEEVAKMPPFQRKTLVLIGAQGVGRRSLKNRFIVLNPTRFGTTVPFTSRKPREDEKDGQAYKFVSRSEMKADIRAGKYLEHGEYEGNLYGTKIDSILEVVQTGRTCILDVNPQALKVLRTSEFMPYVVFIAAPELETLRAMHKAVVDAGIHHPRLXPNSDLKKTVDESARIQRAYNHYFDLDPSINDNPRPKPFEKLQTAIEKPENGPPQWVPQSAWVYLMIQ

SEQ ID NO: 9921 - protein, 295 aa, Homo sapiens
  DOMAIN (241)..(279): Lysyl oxidase  copper-binding region proteins domain identified by eMATRIX, accession number BL00926B, p-value=2.358e- 09, raw score of 13.84
  misc_feature (1)...(295): Xaa = X or * as defined in Table 2
RNVHLNLLIHFILYFKINVFHIDFPLGGEKNSGVLGFQAVQKQPRGSFFLPRIPQXQNLRIGIXKGRRGPGSGPWPAGDTQQHPSKGKGLPPLPACPSLXXQQGRRCSCGPGGRLGSXGCKHPECQWSQRGVRPLSVPLFQPPPGTGAGPTSWASASGSGAGACQPGSPLGSVHTGSPSQAKSPPSRVKXQECQHPTHVSSPVSRRPGFPKLPGGNRAGPAAPSPPRDTPAAPPPRPGPPSPGSLAQDAPGRSLPPPRTRRPAAQSPRPRSASESEAARRGPVRRSRTGREEKSG

SEQ ID NO: 9922 - protein, 72 aa, Homo sapiens
  misc_feature (1)...(72): Xaa = X or * as defined in Table 2
FATLYPLKIFIFPKAFNPWREVGPLCPPPKCKGPSPKSPGWCLNRPPIGKKLIPCKPRLTWAPPRILXNGPP

SEQ ID NO: 9923 - protein, 51 aa, Homo sapiens
  misc_feature (1)...(51): Xaa = X or * as defined in Table 2
RPLRGTPCXCAAWASSWWGCCSACCSHCCLLGPCWHSGPCSAXWAFWCSGG

SEQ ID NO: 9924 - protein, 262 aa, Homo sapiens
  misc_feature (1)...(262): Xaa = X or * as defined in Table 2
AAPGAMGPWPDRLCGSALPSCRLPCYSSASVSLRCAAENTFTQAGPCCWAWPHRAHQDFPLQIPFRHLEAPRCSPPLSAWPPRHLLPAGDPDLQQEPPGIRGAPXRPLRGTPCCGSCGVAAGVRGCGPVWLXHPEPADSHTATAEPRIXAAPGAMGPWPDRLCGSALPSCRLPCYSSASVSLRCAAENTFTQAGPCCWAWPHRAHQDFPLQIPFRHLEAPRCSPPLSAWPPRHLLPAGDPDLQQEPPGIRGAPLSLRRRLLL

SEQ ID NO: 9925 - protein, 41 aa, Homo sapiens
  misc_feature (1)...(41): Xaa = X or * as defined in Table 2
MVRKRMEMKMRKLSQLRASGQLKMMRMXMSIPRSRRPRGIX

SEQ ID NO: 9926 - protein, 79 aa, Homo sapiens
HGLFSVEENEENGEQEADNEVDEEEEEGGEEEEEEEEGDGEEEDGDEDEEAESATGKRAAEDDEDDDVDTKKQKTDEDD

SEQ ID NO: 9927 - protein, 146 aa, Homo sapiens
  misc_feature (1)...(146): Xaa = X or * as defined in Table 2
TLAFFLIPCIGSPACPTMSDAAVDTSSEITTKDLKEKKEVVEEAENGREDRPCLTGNAENEENGEQEAXQLRXDEEEREGRLGREGGREGRKEGXLVEEEDGRLKIEEAESATGKRATEDDEDDDCRYQRSRRPDEDDLDSKKAKS

SEQ ID NO: 9928 - protein, 25 aa, Homo sapiens
  misc_feature (1)...(25): Xaa = X or * as defined in Table 2
SGRPFFFFFFFFFFFXCKGFLIGYM

SEQ ID NO: 9929 - protein, 58 aa, Homo sapiens
MKLIQLSCQPFNSRHHVLKKKPLTFMILSHFQASLSSIFGFCSSLFRQSSFFSNILFF

SEQ ID NO: 9930 - protein, 107 aa, Homo sapiens
  misc_feature (1)...(107): Xaa = X or * as defined in Table 2
KYLVDQHAGSPPVKNILAEAVQNIVQILHXEIQKSVNHRYMLXKLDTDSLXXFIIQLQEPTILGIKVDVYKHEYKDKDGHSDFSNYSSHQVFFLFLLIFNKDNMAIN

SEQ ID NO: 9931 - protein, 41 aa, Homo sapiens
GDCRLDPLHLAWNQPLWLSILPSINCLRYHNIPSYMYQNSY

SEQ ID NO: 9932 - protein, 83 aa, Homo sapiens
  misc_feature (1)...(83): Xaa = X or * as defined in Table 2
CQIMDGMLAIQAWPTPQQVASNGTGLNPNAKVWQEIAPGNTDATPVTHGTESSWHEIAATSGAHPEGNAEPQKIYVKNMKXCI

SEQ ID NO: 9933 - protein, 95 aa, Homo sapiens
  misc_feature (1)...(95): Xaa = X or * as defined in Table 2
SSADSKCTLTIGKPAKSRVQLCHKEETFPNQTNAYRTCVDXCLMSPTLLGTSIFXSQMIIIRVVPICMPNIFLIISCXVLCIRKPVSELPHLLGF

SEQ ID NO: 9934 - protein, 56 aa, Homo sapiens
NSTTNCLVISNPQGLQYKGKANLHDSRDLGEFSNLTDFKEKSHVVHILFVLHFYYS

SEQ ID NO: 9935 - protein, 1451 aa, Homo sapiens
  DOMAIN (925)..(980): RNA POLYMERASE NUCLEOCAPSID ALPHA SUBUNIT RNA-D domain identified by eMATRIX, accession number PD02316B, p-value=8.515e- 09, raw score of 25.30
IMEIEEQKPKQLELLEQIEQQKLRLETDCFRAQLEEEKRKKTQPTGVGCRKSHHYINHLVGIAPASCPVISDEDSHRQMIRNYQHQLLQQNRLHRQSVETARKQLLEYQTMLKGRCPSVSAPSLITDSVISVPSWKSERPTAISEHWDQGQRLKLSPNKYQPIQPIQTSKLEQDHFQVARQNHFPQRQVETTETLRASDILTNQALESQEHLRQFSQTETQQRDYKLVPKDSETLSRALSHDRQLISQDARKISETFGATTFQSLESQQLFSENSENISYHLTEPSSFVPLVPQHSFSSLPVKVESGKIQEPFSAMSKSTVSTSHSIISQMHDRPLLPSENITAQQGNMKALQEQLDLQKKVLQATQEAQEQLLLCKQKEVEQQTGLSVFLPLVTPDSSALLPSAKADLGRIQESSPTKNNIAVSSDHHVISQLQDKRLSLSQPILSQQNNFKFLQEQLNIQKDSLQARREAQEVLYVHKQSELDRRVCSEQAEPSFPFQVAQHTFTSLPSADTKSGKIQEQHSSKSEKGLVSCQSDIPISQDGSLSFLQQFLPLHDSLKLLQEQLTKQRDTLQARHEAQVELLLHRQRDLGDSKSGLVSSSSSPVVVQHSVASQASAKAEPRRIQELYLSEKENVGPSCHLIIPTFQDKSLSFPQHSLAQQENLTILQEQSQIQRVILGAKEGTQEFVHTESELEKRISSEQTGTSSSLSQVDESERFQECISIKSDSTIPLSHPKIPRCQERLLRVSQHMLPLQDNLEEHQAWLDTEKEAFHFSQKTQENTSSEQTGSSSFIPQLVQLSFTSLASAESGTILEPLFTESESKIFSSHLQIPQLQDRLLRISQLIQPQQDNLKALQEQLATQREAIILARQEAREELLLHQSEWEGRISPEQVDTSSLPLVPQHSFASLPLNESERNQEPCSINSDNIVSSGHSEIPTLPDGLLGLSHLVLPQQDNLIALEEHLHAQTDFLPSIEKTQKELVLSKPCKFEEKVSSEHFIQSHHGDLQALQQQLDTQKKAIRSIQEVQEELLLQRLSELEKRVSSEQVCSSSFVSQVPVADSERTQKSFPTKSNDTLPSSHREIPRLQDRLLSLSKPILPQQDNMTAQLDAQREVMYSYEKPQEELSLNKQRKLNKSESAEHTIPSLFLPKETEHSFIPLPFAEAKPKSTCELYSSQNEHAAPPSNPVIPGFQDRLLSFSQSVLTQQDNLGLQKQLDLQREVLHYSQKAQEKLLVQRQTALQQQIQKHEETLKDFFKDSQISKPTVENDLKTQKMGQLRDWFPNTQDLAGNDQENIRHADRNNSDDNHLASEDTSAKQSGEHLEKDLGRRSSKPPVAKVKCGLDLNQHELSAIQEVESPAIGRTSILEENLLPSREGPSPGRIHHLLIKEPLGPSSGSQVVYAMGLRQIPSFSKVFGIIIRVATLLAVKGTSATVVNKALAHMKCTLQREG

SEQ ID NO: 9936 - protein, 340 aa, Homo sapiens
MGKTTPMIQSRPSFDTWELQVPPSTCGDYNSSFIKELRASQSNVIKPPGPVKLKESVVENHAVLSYAVEEEHAYLGPTVKPDDKAKTLSYEPLSSATVSTGSLLSYENTDLSLTDPESFSEHMDDSKQESTTSKEEETNIISSIVPSTQDIYQRQNSSDVHKSLLPAVDETTCGHTHFQQMIDKALYQSGKPETGHGIMEEPELTLISTTDTSIAEMDFANLTLEEKSENEAKCFFQQSKTRLKRLKRVKHATFLPLATEASDYPAVSELSIEKPRTASTETPRRLTPVPGSLQEAFIKRKKSFMERSHQRQKEIRNKIHVSENSQIKTVKEKPSISSIL

SEQ ID NO: 9937 - protein, 93 aa, Homo sapiens
  misc_feature (1)...(93): Xaa = X or * as defined in Table 2
KYLVDQHAGSPPGKSLCCLEKSQRMMMISQNLDVVLRVXTADDANXEKCVPILANLFFQVSNLLHXVLVYHLLKVCVTTCSFIHCRQQRFMNV

SEQ ID NO: 9938 - protein, 191 aa, Homo sapiens
  misc_feature (1)...(191): Xaa = X or * as defined in Table 2
TTTMSSKKAKTKTTKKRPQRATSNVFAMFDQSQIQGVQRGPFNMIDQNRDGFHSDKEKVLHDMLASLGKNPHXWHYLDAMMNEAPGPIQFSPCFLTLFGXGSLNGHQIPXRCSFRKRLAFALDEEATGHPFREDYLREELLTNPWGDRVYQIEEVGXTCTGEAPIXQKGGNSNYHRSFTRHPNWKAPKAQR

SEQ ID NO: 9939 - protein, 144 aa, Homo sapiens
  DOMAIN (84)..(110): TROPOMYOSIN SIGNATURE domain identified by eMATRIX, accession number PR00194E, p-value=3.250e-30, raw score of 8.74
  DOMAIN (1)..(121): Tropomyosins domain identified by PFam, accession name Tropomyosin, E-value=8.1e-63, PFam score of 198.2
  misc_feature (1)...(144): Xaa = X or * as defined in Table 2
LVIIESDLERAEERAELSEGKSDSWKNNXEXWIRPXKHXWLQRISKCAELEEELKTVTNNLKSLEAQAEKYSQKEDRYEEEIKVLSDKLKEAETRAEFAERSVTKLEKSIDDLEDKFLCFTSPKTPSSSWMSHLSELCICLFSS

SEQ ID NO: 9940 - protein, 274 aa, Homo sapiens
  DOMAIN (135)..(164): TROPOMYOSIN SIGNATURE domain identified by eMATRIX, accession number PR00194C, p-value=1.900e-35, raw score of 6.38
  DOMAIN (36)..(274): Tropomyosins domain identified by PFam, accession name Tropomyosin, E-value=7.9e-137, PFam score of 428.6
GSRVRRAAAGLSHCSPPARLPSGAMAGSSSLEAARRKIRSLQEQADAAEERAGTLQRELDHERKLRETAEADVASLNRRIQAWFEEEFGFVPKERLATAFQKLEEAEKAADESERGMKVIESRAQKDEEKMEIQEIQLKEAKHIAEDADRKYEEVARKLVIIESDLERAEERAELSEGQVRQLEEQLRIMDSDLKALMAAEDKYSQKEDRYEEEIKVLSDKLKEAETRAEFAERSVTKLEKSIDDLEEKVAHAKEENLSMHQMLDQTLLELNNM

SEQ ID NO: 9941 - protein, 363 aa, Homo sapiens
  DOMAIN (108)..(157): Tropomyosins proteins domain identified by eMATRIX, accession number BL00326B, p-value=1.000e-40, raw score of 7.68
  DOMAIN (33)..(307): Tropomyosins domain identified by PFam, accession name Tropomyosin, E-value=1.7e-58, PFam score of 184.7
  misc_feature (1)...(363): Xaa = X or * as defined in Table 2
PDRATRPRPRARPADPALVLGPLAAVTMGAGKKKMRMLKLDKENALDRAEQAEADKKAAEDRSKQLEDELVSLQKKLKGTDRXTGQILXRLSKMPKEETWNWQEKKATDAEADVASLNRRIQLVEEELDRAQERLATALQKLEEAEKAADESERGMKVIESRAQKDEEKMEIQEIPTXKRAKHIAEDADRKYEEVARKLVIIESDLEPCRGSGAELSEGKCAEAXKEEFENLXPNNFEVHLEGSRLRKYSQKERPDMEEEIKGPFPDKAXRRLETRAWSFAERSVTXNLEKSIDDLEDRAVTLQETEVQSHQRRSWDHALNGYDFHISFFASLLPRLPRRSWMSHLSELFHLSYSPADPGSLS

SEQ ID NO: 9942 - protein, 88 aa, Homo sapiens
SGRCCECRIGTVISKSGIGGKRDKLSRYQTVTCQAAQQLPSTCLSHRSLHGKGKGKGKDDGRGRGPGLVAPSPSALKLLNPVWLSLRD

SEQ ID NO: 9943 - protein, 274 aa, Homo sapiens
  misc_feature (1)...(274): Xaa = X or * as defined in Table 2
DICKEYEVMYSSSCETTRNTTGIEESTDGMILRPEDLSYQIYDVSGESNSAVSTEDLKECLKKQLEFCFSREKLSKDLYLISQRDSDQFIPIWTAANMEEIKKLTTDPDLILEALRSSPMVQVDEKGEKVRPTHKRCIVILREIPETTPIEEVKGLFKSEYCPKVISCEFAHNSDWYITFQSDTDAQQAFKYLRKEVKQFKARPILAGIKAINTFFCXEWSSNNGILESIVHPIXTQAQYASPVFMQPVYNPHQQYSVYSIVPQSWVSKSYTLL

SEQ ID NO: 9944 - protein, 60 aa, Homo sapiens
RTSLPCCSPAQEPCRRTAWPTSMATTPTPSLRNTASGTCGSSSTSMWKRWTCSRVTLKRN

SEQ ID NO: 9945 - protein, 156 aa, Homo sapiens
  DOMAIN (22)..(49): C1q domain proteins domain identified by eMATRIX, accession number BL01113A, p-value=1.692e-09, raw score of 17.99
  misc_feature (1)...(156): Xaa = X or * as defined in Table 2
GLAASSRKHQMVDDADAVGGPGGPGMAGCDGLPGGFGSDIRPRLWLWLGPRLWSSXRGTNIILASVPKKLLLMDCYALARDRTATLGTFDAISKTASNWIPDLWKETVFTKFPYQEFTDHLVKTHTRVSKQKTQVPAVATTAARQTMEGQAPVEYI

SEQ ID NO: 9946 - protein, 203 aa, Homo sapiens
  misc_feature (1)...(203): Xaa = X or * as defined in Table 2
AMAEDHGLSNGDGPVEVTQGLELLVSAAAQDIVLLDGIQGLFLTLQFDNIWVWDHFLGKLPHRVFKGGGEKQHLAVPGQHPLDADALILVALSGYHDISLIQNKHLDFLGINELDLEHQSSTVPGVPMTICSLIFWPLSNLLPRTAXASFSSGXNLPICSITFPVXSASSYVGERHRHWGYLSDGSTRLSMAKTKAAVLPVPD

SEQ ID NO: 9947 - protein, 168 aa, Homo sapiens
LTGPITMAQAMIFCHTRKTASWLAAELSKEGHQVALLSGEMMVEQRAAVIERFREGKEKVLVTTNVCARGEQRTCPTWSARLGVPGPIRARNPCIQGSRMVSGRWVGLVTLFLSRRDCLDFPEVVRTHTCQVRWLMPAIPRQENCLNPGDRGCSEPRMCYSTPSWVTE

SEQ ID NO: 9948 - protein, 292 aa, Homo sapiens
  DOMAIN (4)..(51): SYNTHETASE LIGASE PROTEIN ALANYL domain identified by eMATRIX, accession number PD01168I, p-value=4.886e-30, raw score of 24.61
  DOMAIN (6)..(75): tRNA synthetases class II (A) domain identified by PFam, accession name tRNA-synt_2c, E-value=2.3e-35, PFam score of 124.3
MLKNEEPRRRPIMSNHTATHILNFALRSVLGEADQKGSLVAPDRLRFDFTAKGAMSTQQIKKAEEIANEMIEAAKVTGSWERDPERTRVLSLDVGHAAGKGRMRGDKDLASHLQTVQPRPCSEWDLLNGHSRTLEEAPLSQCCWGLRGLEPGALMRPVGGASLSTLRSQLHISFPLTLEPWVVQGGHSLAFCAMAYPKVTSTHNVVTLGIDVEQVSVVINFDLPVDKDGNPDNETYLHRIGRTGRFGKRGLAVNMVDSKHSMNILNRIQEHFNKKIERLDTDDLDEIEKIAN

SEQ ID NO: 9949 - protein, 87 aa, Homo sapiens
GNPLSSYSFCSMCLTELDPILTEVTLMNARSELYLRFLKKRISSDFEVGDSMASEEVKQEHQKSLDKLLNNCLLSCTMQELIGLYVT

SEQ ID NO: 9950 - protein, 71 aa, Homo sapiens
  misc_feature (1)...(71): Xaa = X or * as defined in Table 2
SLFQLKTTKTQSRVMGAIYDSSWFQEDRQAAERFTDRSTHLRLRNAEAAAXTKPAQGPGSIPILPATPSSL

SEQ ID NO: 9951 - protein, 44 aa, Homo sapiens
  misc_feature (1)...(44): Xaa = X or * as defined in Table 2
LCCSIXIYLNNLLICXQSFSVLKXDFRVDXKKKNPRMSHRVLNI

SEQ ID NO: 9952 - protein, 567 aa, Homo sapiens
  misc_feature (1)...(567): Xaa = X or * as defined in Table 2
TESREHFSPWYSVTAARRPQVASKAEENLLMVLGTDMSDRRAAVIFADTLTLLFEGIARIVETHQPIVETYYGPGRLYTLIKYLQVECDRQVEKVVDKFIKQRDYHQQFRHVQNNLMRNSTTEKIEPRELDPILTEVTLMNARSELYLRFLKKRISSDFEVGDSMVSXEVKQEHQKCLDKLLNXLAFLSCYHGRELIGLYVTMEEYFMRETVNKAVALDTYEKGQLTSSMVDDVFYIVKKCIGRALSSSSIDCLCAMINLATTELESDFRDVLCNKLRMGFPATTFQDIQRGVTSAVNIMHSSLQQGKFDTKGIESTDEAKMSFLVTLNNVEVCSENISTLKKTLESDCTKLFSQGIGGEQAQAKFDSCLSDLAAVSNKFRDLLQEGLTELNSTAIKPQVQAWINSFFSVFHNIEEEEFNDYEANDPWVQQFILNLEQQMAEFKASLSPVIYDSLTGLMTSLVAVELEKVVLKSTFNRLGGLQFDKELRSLIAYLTTVTTWTIRDKFARLSQMATILNLERVTEILDYWGPNSGPLTWRLTPAEVRQVLALRIDFRSEDIKKAALVS

SEQ ID NO: 9953 - protein, 190 aa, Homo sapiens
  misc_feature (1)...(190): Xaa = X or * as defined in Table 2
VVTLTGSNLYFYCSLFIFSVLPDQDVSLVXICYLSLPLDIVCFCNVKIQFFFLSLESYYXFLTIFPHCFYFLLKTPFKHRELFILVFGLLKIFQLCXFFYLILLLRFYFINFCFLLDLFLFWIFIWYFVIFACSWFIGVSLKFLLVPLCSFFLRCRHSPLFXGASXTDLYILGCIPFPXVCLLWEFCGGL

SEQ ID NO: 9954 - protein, 117 aa, Homo sapiens
  misc_feature (1)...(117): Xaa = X or * as defined in Table 2
TFTQDSAGSLVVHSPMTSIWKTAESVDQGHFPIIILILFVYLLFETGSHSVTHATMQWCDHSSLQPQTPSGSGDPPTLACXVPGIIGMCHHTWLIFTPFAETGSHHVPRLVSNSPLA

SEQ ID NO: 9955 - protein, 108 aa, Homo sapiens
  DOMAIN (24)..(76): Tubulin subunits alpha beta, and gamma proteins. domain identified by eMATRIX, accession number BL00227C, p-value=1.000e- 40, raw score of 25.48
  DOMAIN (4)..(108): Tubulin/FtsZ family domain identified by PFam, accession name tubulin, E-value=3e-68, PFam score of 240.1
LCSLTGQSGAGNNWAKGHYTEGAELVDSVLDVVRKEAESCDCLQGFQLTHSLGGGTGSGMGTLLISKIREEYPDRIMNTFSVVPSPKVSDTVVEPYNATLSVHQLVKN

SEQ ID NO: 9956 - protein, 461 aa, Homo sapiens
  DOMAIN (49)..(104): Tubulin subunits alpha beta, and gamma proteins. domain identified by eMATRIX, accession number BL00227B, p-value=1.000e- 40, raw score of 19.29
  DOMAIN (1)..(456): Tubulin/FtsZ family domain identified by PFam, accession name tubulin, E-value=4.9e-146, PFam score of 498.6
  misc_feature (1)...(461): Xaa = X or * as defined in Table 2
RESGTWQPGKAGTQTGAKFWEVISDEHGIDPTGTYHGDSDLQLERINVYYNEATGGKYVPRAVLVDLEPGTMDSVRSGPFGQIFRPDNFVFGQSGAGNNWAKGHYTEGAELVDFVLDVXRKEAESXDCLQGFQLTHSLGGGTGSGMGTLLISKIREEYPDRIMNTFSVVPSPKVSDTVVEPYNAILSGHQLVENTDETYCIDNEALYDICFKTLKLTTPPFGDLNHLVSATMSGVTTCLRFPGQLNADLRKVAVNMVPFPRLHFFMGGFAPTDQAGASQASTRALTVPRSSPKQMFDAKNMMAACDPRAWAAYLDGLPPCFRGPHVPLKEVDEQMLNVQKQKQPAIFVEWIPQQCEKRAVCDIPHLRGLKNVRPPSFGKQARPIPGAFSKPHLPKQFHGPCFRRKALPSFITGGEGMDEMEFHPRPESNKNDLVSEYQQYQDATAEEEGEFEGRSLGRKVA

SEQ ID NO: 9957 - protein, 119 aa, Homo sapiens
  DOMAIN (15)..(61): Vertebrate metallothioneins proteins domain identified by eMATRIX, accession number BL00203, p-value=2.469e-09, raw score of 13.94
  misc_feature (1)...(119): Xaa = X or * as defined in Table 2
QQEANPSAPLQHVSTSNCCVLTCCKGAEGLASCCYCHCLCNECCQGACGPDTHLAHCCRCQHSSKPPGGPRIASTQTCYYXCPCRLPGGSRTXCLASCPYHWCPWTSLPGSPVPNKAPP

SEQ ID NO: 9958 - protein, 61 aa, Homo sapiens
YYKRIPEAKRLTNTVFNFSIFSHSTHRTFGKQQWQQLYDTLNAWKQNLNKVKNSLLSLSDT

SEQ ID NO: 9959 - protein, 389 aa, Homo sapiens
  DOMAIN (325)..(355): kw TRANSCRIPTASE REVERSE II ORF2 domain identified by eMATRIX, accession number DM01354M, p-value=3.625e-26, raw score of 12.50
MVELLGSYTEDNASQARVDAHSCASSVARPSSLFRSAWSCEWSVRCARACTMSVPAFIDISEEDQQQNEKYRVPQFDQSTIKNIESAKGLDVWDSWPLQNADGTVAEYSGYHVVFALAGSPKDADDTSIYMFYQKVGDNSIDSWKNAGRVFKDSDKFDANDPIMKDQTQEWSGSATFTSDGKIRLFYTDYSGKHYGKQSLTTAQVNVSKSDDTLKINGVEDHKTIFDGDGKTYQNVQQFIDEGNYTSGDNHTMRDPHYVEDKGHKYLPNRGHARSSRRRQEISKIREELKEIEIQKPLQKINESRSWFFEKINRVDRLLARLMKKREKNQIVAIKNDKGDMTTDPTEIQTTVREYYKHLYAYKLENLEEMGKFLDTYTLPRLNQEEVDL

SEQ ID NO: 9960 - protein, 435 aa, Homo sapiens
  misc_feature (1)...(435): Xaa = X or * as defined in Table 2
SGILGTTTPSFPVGVVLRVECPLCPGPAPMSVPAFIDISEEDQAAELRAYLKSKGAEISEENSEGGLHVDLAQIIEACDVCLKEDDKDVESVMNSVVSLLLILEPDKQEALIESLCEKLGPNFREGEPPRLLRLQFVKATFSTGMDXEILPVKIHSVICSLIKVAASCGAIQYHPQLEPGIKFRKWDFLNWNLTTGKKSTPLLKTTFMKALVDCKKSDAASKGMVELLGSYPGGQCFPRARVDAHRCIVRALKDPNAFPFDHLLTLKPRQVFWKGELIHIVPFXPNFVSAXMGHHMSRFYPDXLRTFHXIPLGPVTMDPGIWPKMRLLFLLWGMGQXENREISFWTTMPARNFRIGADDVEAFVIDAGKELKMVYCQNWSRPQRKVVVSHSTHRTFGKQQWQQTVYDTLNAWKQNLNKVKNSLLSPSGYLKFLCL

SEQ ID NO: 9961 - protein, 673 aa, Homo sapiens
  DOMAIN (77)..(120): kw TRANSCRIPTASE REVERSE II ORF2 domain identified by eMATRIX, accession number DM01354T, p-value=2.184e-22, raw score of 9.48
  misc_feature (1)...(673): Xaa = X or * as defined in Table 2
FSLECLGHENRXDXITIYKITSLGTGKVFNKIQHPFTIKNKKXKTLNKLGIEGNFLNLIKGIYEEPMVSIILNGEGLDYFPLRSETRQGCLLWPFLFNIVLDSQERAIRQENKIKVIXVGKEEVXLNRMGDDMVVLCIVIQGKIXKIQRHDLLINKFSKVTGYRINICRKLVIFHIXYQLNKSQNDVKKTIXFSTMVKLGGLCRVIPTLWESEAERLLEARRPAWETVRSHLYKNKQTKNNKQTKNTLDVMTLICRLSYSEAEVXGWLEPQSSKLQXAITGSLQSSLDRQSXTLTQKKTKKKRKKLTASERVKYQYNXGSRNIDPHLSSNXLLENSAXGQFQWGGKIVFFIKXCLETWISTWQNNGNWDSYLILHIKINSELTXDLNVRANIVSIFKENMGVNLSDFELGNDFLNKXPLKTQATKEENRXIKIKTICVSKDNIKKAKIQPTEXDNFFXNHVLVKGGICIXNMXRTVTIIIKRHIIQFLKIQQGVWNXQFSKGGYTKGPLRHMEKVSQPSLAIREMQMRSTMRYHLTPLEXIYNQSDNIKCWXGCREIGTLMHCWWYPRDIKTNVYTKTCAQMFLPALFIXAQKXNGPXFLSLTSALTKTWHIHTMEYYSSQXKKEMKVLIWPPTTMEKPLEKPYPSEECPRHERPTYYMISIYMKCPRTGEYI

SEQ ID NO: 9962 - protein, 148 aa, Homo sapiens
  DOMAIN (120)..(144): FOS TRANSFORMING PROTEIN SIGNATURE domain identified by eMATRIX, accession number PR00042E, p-value=8.425e-25, raw score of 9.69
GEFADSFSSMGSPVNAQDFCTDLAVSSANFIPTVTAISTSPDLQWLVQPALVSSVAPSQTRAPHPFGVPAPSSGAYSRAGVVKTMTGGRAQSIGRRGKVEQETDQLEDEKSALQTEIANLLKEKEKLEFILAAHRPACKNPDDLGFPE

SEQ ID NO: 9963 - protein, 441 aa, Homo sapiens
  DOMAIN (275)..(292): FOS TRANSFORMING PROTEIN SIGNATURE domain identified by eMATRIX, accession number PR00042C, p-value=1.273e-22, raw score of 8.29
  DOMAIN (276)..(381): bZIP transcription factor domain identified by PFam, accession name bZIP, E-value=0.035, PFam score of 13.1
  misc_feature (1)...(441): Xaa = X or * as defined in Table 2
DEMSVAGSFLFTAACGTGNSPHLCPEHARSRRLSPSVLFXDFCTDLAVSSANFIPTVTAISTSPDLQWLVQPALVSSVAPSQTRAPHPFGVPAPSAGAYSRAGVVKTMTGGRAQSIWQEGARWEQVRNFXRTLPGNVGAGWEAAPEMQEPSTEDEATXWGLLAHPXLGALAPSPFHPNSDSEFSPXEVLSXFLPXVSYRMLSDWALLCSLAEDLILNASHTXSATAGQKWFHSGVPGSREAAGASSTGVGEWRXWQTLLLNVGLFLXLFXLSPEEEEKRRIRRERNKMAAAKCRNRRRELTDTLQAGRYSVGCSFLKLKGKVGRLEHKGPXVRLCLYAFPLSLCIQETDQLEDEKSALQTEIANLLKEKEKLEFILAAHRPCLARFPDGPGAFPEEMSVASLDLTGGLPEVATPESEEAFTLPLLNDPEPKPSVEPVKASA

SEQ ID NO: 9964 - protein, 480 aa, Homo sapiens
  DOMAIN (199)..(212): bZIP transcription factors basic domain proteins domain identified by eMATRIX, accession number BL00036, p-value=4.214e-13, raw score of 9.02
  misc_feature (1)...(480): Xaa = X or * as defined in Table 2
PHLQRATEKPRLSRRPRRSERAVTVLLPSSASQRPPVSAPRPLARLCLTATMMFSGFNADYEASSSRCSSASPARDSLSYYHSPADSFFSMGSPVNAQDFCTDLAVSSANFIPTVTAISTSPDLQWLVQPALVSSLWAPSQTRAPSTFSESPPPTAGAYSRAGVVKTMTGGRAQSIGRRGKVEQLSPEEEEKRRIRRERNKMAAAKCRNRRRELTDTLQAETDQLEDRKSALQTEIANLLKEKEKLEFLSLAAHRPACKIPLIDLGLPRKEMSVGSLDLTGGLPEGSTPESEEAFTLPLLNDPEAQGPQWEPVQGGISRHGSXKDRGPFDDFLFPSIHPGPSGFLRTARSVPDMGPILGPFYGRQIRGAFSHSGSLGMGAHGHRGWEPLCTPVVTCTPSCNCLHVFPRFHLPRGXLLPQLCSCPPQGQQQQXAFLXLAQLTHAAGPVRGQGRGGSRHPQVPLPELVHYREEKHIFPRGFL

SEQ ID NO: 9965 - protein, 82 aa, Homo sapiens
  misc_feature (1)...(82): Xaa = X or * as defined in Table 2
PGYRRGHGGAAEGRQEPAARHNPAVREDADGGDRPRSAACPGTSTAPPGTXGSGQAHRDGARPAPAPRPSHPSAGPAAGPSG

SEQ ID NO: 9966 - protein, 66 aa, Homo sapiens
  DOMAIN (2)..(65): Caspase recruitment domain identified by PFam, accession name CARD, E-value=5.2e-10, PFam score of 46.7
  misc_feature (1)...(66): Xaa = X or * as defined in Table 2
MAEGNHRKKPLKVLESLGKDFLTGVLDNLVEQNVLNWKEEEKKKYYDAKTEDKVRVMADSMQEKQX

SEQ ID NO: 9967 - protein, 328 aa, Homo sapiens
  DOMAIN (151)..(187): Caspase family histidine proteins domain identified by eMATRIX, accession number BL01121B, p-value=1.346e-26, raw score of 29.68
  DOMAIN (136)..(267): ICE-like protease (caspase) p20 domain identified by PFam, accession name ICE_p20, E-value=1.4e-87, PFam score of 293.7
MGSLEGNHRKKPLKVLESLGKDFLTGVLDNLVEQNVLNWKEEEKKKYYDAKTEDKVRVMADSMQEKQRMAGQMLLQTFFNIDQISPNKKAHPNMEAGPPESGESTDALKLCPHEEFLRLCKERAEEIYPIKERNNRTRLALIICNTEFDHLPPRNGADFDITGMKELLEGLDYSVDVEENLTARDMESALRAFATRPEHKSSDSTFLVLMSHGILEGICGTVHDEKKPDVLLYDTIFQIFNNRNCLSLKDKPKVIIVQACRGANRGELWVRDSPASLEVASSQSSENLEEDAVYKTHVEKDFIAFCSSTPKYSWCCHLEEVFRKHCSQ

SEQ ID NO: 9968 - protein, 298 aa, Homo sapiens
  DOMAIN (182)..(218): Caspase family histidine proteins domain identified by eMATRIX, accession number BL01121B, p-value=1.346e-26, raw score of 29.68
  DOMAIN (174)..(298): ICE-like protease (caspase) p20 domain identified by PFam, accession name ICE_p20, E-value=6.6e-76, PFam score of 255.0
  misc_feature (1)...(298): Xaa = X or * as defined in Table 2
GSFQRCKKGQRLFPMAEGNHRKKPLKVLESLGKDFLTGVLDNLVEQNVLNWKEEEKKKYYDAKTEDKVRVMADSMQEKQRMAGQMLLQTFFNIDQISPNKKRXXIGVTEAEITIYVLQYPAAHPNMEAGPPESGRILPDCLKLCPHEEFLRLCKERAEEIYPIKERNNRTRLALIICNTEFDHLPPRNGADFDITGMKELLEGLDYSVDVEENLTARDMESALRAFATRPEHKSSDSTFLVLMSHGILEGICGTVHDEKKPDVLLYDTIFQIFNNRNCLSLKDKPKVIIVQACRGGEC

SEQ ID NO: 9969 - protein, 441 aa, Homo sapiens
  DOMAIN (214)..(230): Caspase family histidine proteins domain identified by eMATRIX, accession number BL01121C, p-value=5.065e-15, raw score of 13.17
  DOMAIN (158)..(275): ICE-like protease (caspase) p20 domain identified by PFam, accession name ICE_p20, E-value=2.2e-25, PFam score of 87.6
  misc_feature (1)...(441): Xaa = X or * as defined in Table 2
GSFQRCKKGQRLFPMAEGNHRKKPLKVLESLGKDFLTGVLDNLVEQNVLNWKEEEKKKYYDAKTEDKVRVMADSMQEKQRMAGQMLLQTFFNIDQISPNKKAHPIMEAGPPESGESTDALTLCPHEEFLRLCXRKELKEIYPIKGRRKQPHTAGLFFICITEFDHLPPRNGADFDITGMKELLEGLWDYSVGVGRRFLTARGMDSALRAFATRPEHKSSDSTFLVLMSHGILEGICGTVHDEKKPDVLLYDTIFQIFNNRNLPQVXRDKPQGSSIVQACRGANPSGNXWVRDSPASLGKWPSSQSSGEPWRKDAVXQDPHVERRDFIGFPGSFKRPHNRAPWERPAQWGSIFITQLITCLPRNIPWCCHTLEEVFRKGTAIHLETPRAKAQMPTIERTVRXQGYFYLFPGEFENWEGHKQPSPSLNPTFKEAPFFVTACIF

SEQ ID NO: 9970 - protein, 108 aa, Homo sapiens
AQCLLLQSPGFEPPWVLAAHPRALQSLQRKHGRSDCGGTGEEASGSSLESDAGFGPPGPGGCAVPQVFQDCPVCLGNHHSQVLGGYCTEGPGLAAGSQACSPLGRVAP

SEQ ID NO: 9971 - protein, 140 aa, Homo sapiens
  misc_feature (1)...(140): Xaa = X or * as defined in Table 2
KIRGVSCPSAPKSGEQTGQHHNINTGFHPLPLGAVTSPVPQGPGDRLCPPPSSPEPAQPAQCXPCSDSGRSPGPGPGKAWTVAPCPEPSVFCLQSPGFEPPWVLAAHPPSSERRASSSGLDDDLPAQETGNGSGATRTCS

SEQ ID NO: 9972 - protein, 56 aa, Homo sapiens
  misc_feature (1)...(56): Xaa = X or * as defined in Table 2
LMVLSDFIFKLKIWPGAVAHACNLSTLGGRGRWITXGQQFETSPASIVKPPSLLKI

SEQ ID NO: 9973 - protein, 319 aa, Homo sapiens
  DOMAIN (86)..(99): Thioredoxin family proteins domain identified by eMATRIX, accession number BL00194, p-value=8.333e-12, raw score of 12.16
  DOMAIN (67)..(129): Thioredoxin domain identified by PFam, accession name thiored, E-value=2.8e-11, PFam score of 41.8
  misc_feature (1)...(319): Xaa = X or * as defined in Table 2
ESSRQALLAKPLSACAEQPARAEVGAATALPVRWASGEMAPSGSLAGPLAALVLVLWGAPWTHGRRTNVRVITDENWRELLEGDWMIEFYAPWCPACQNLQPEWESFAEWGEDLEVNIAKVDVTKQPGLSGRFIITALPTIYHCKDGEFXAVIQGPRTKKDFINFISDKEWKSIEPVSSWFGPGSVLMSSMSALFQLSMWIRTCHNYFIEDLGLPVWGSYTVFALATLFSGLLLGLCMIFVADCLCPSKRRRPQPYPYPSKKLLSESAQPLKKVEEEQEADEEDVSEEEAESKEGTNKDFPQNAIRQRSLGPSLATDKS

SEQ ID NO: 9974 - protein, 149 aa, Homo sapiens
  DOMAIN (92)..(108): Phorbol esters / diacylglycerol binding domain proteins domain identified by eMATRIX, accession number BL00479B, p-value= 9.069e-13, raw score of 12.57
  DOMAIN (66)..(115): Phorbol esters/diacylglycerol binding dom domain identified by PFam, accession name DAG_PE-bind, E-value=1.7e-14, PFam score of 61.6
HRGGLPGLKLPDFQDSIFEYFNTAFLLHDLTFRTSSASEQETQAPKPEASPSMSVAASEQQEPKAHQFSIKSFSSPTQCSHCTSLMVGLIRQGYACEVCSFACHVSCKDGAPQVCPIPPEQSKRPLGVDVQRGIGTAYKGHVKVPKPTG

SEQ ID NO: 9975 - protein, 178 aa, Homo sapiens
IISPHINKDEDVQRDLEHSLQMEAYERRIRRLEQEKLELSRKLQESTQTVQSLHGSSRALSNSNRDKEIKKLNEEIERLKNKIADSNRLERQLEDTVALRQEREDSTQRLRGLEKQHRVVRQEKEELHKQLVEASERLKSQAKSALSGPAPPSPATPLPSWAFCWMGTWGVLVFTFLM

SEQ ID NO: 9976 - protein, 690 aa, Homo sapiens
  DOMAIN (462)..(482): SOMATOSTATIN RECEPTOR TYPE 1 SIGNATURE domain identified by eMATRIX, accession number PR00587A, p-value=1.700e-09, raw score of 8.06
  misc_feature (1)...(690): Xaa = X or * as defined in Table 2
FRRSPSPAAVSLGLGVAVVSSLVNGSTFVLQKKGIVRAKRRGTSYLTDIVWWAGTIAMAVGQIGNFLAYTAVPTVLVTPLGALGVPFGSILASYLLKEKLNILGKVGCLLSCAGSVVLIIHSPKSESVTTHAELEEKLDQSRVGGLPCASLLVMLAAAHLLDPCRPMGPPTSWSTSASAPCWADTPCLPPRASGWRPKTSCITTRPVREPSACAWYSWPCSAAASSSSSGTRNKALECFDSSVFGAIYYVVFTTLVLLASAILFREWSNVGLVDFLGMACGFTTVSVGIVLMRVFKEFNFNLGEMNKSRDTWRQSSPLIVAPRDHFHLERGVQFQNMNSVMGSHLVMVALSPGVDFIPQPDDPAALLVTELFANRLVSGYAPATGLQGTILQYGNTLMEVMPKICRLPRHECGSPGPPGSCAPPPSPHSTRRRPPRSADCGPCKGTGTRRERAPGAGXAEAAGPGEGGVGAGAANAGAGAADAGAGGADAGAGGAGAGAGGAGAGAGGAGAGAGGAGAGAGGAGAGAGGAGAGAGGAGAGAGGAGAGAGGAGAGAGGAGAGAGGAGAGAGGAGAGAGGAGAGAGGAGAGAGGAGAGAGGAGAGAGGAGAGAGGAGAGAGGAGAGAGRAGAGAGGAGAGAGGACAGAGGAGAGAGGAGAGAGGPVAGAGGAVCSQTIFTRSHGGLHLWRPC

SEQ ID NO: 9977 - protein, 1731 aa, Homo sapiens
  DOMAIN (150)..(181): Protein kinases ATP-binding region proteins domain identified by eMATRIX, accession number BL00107A, p-value=1.783e-14, raw score of 18.39
  DOMAIN (33)..(302): Eukaryotic protein kinase domain identified by PFam, accession name pkinase, E-value=3.9e-47, PFam score of 170.0
MAAAGTGTCWLLAIGSQKVWKPLSLPVAVVKMKNTERIYAMKILNKWEMLKRAETACFREERDVLVNGDCQWITALHYAFQDENHLYLVMDYYVGGDLLTLLSKFEDKLPEDMARFYIGEMVLAIDSIHQLHYVHSWTPKAFRVRKSVADQDPVGAPHRDIKPDNVLLDVNGHIRLADFGSCLKMNDDGTVQSSVAVGTPDYISPEILQAMEDGMGKYGPECDWWSLGVCMYEMLYGETPFYAESLVETYGKIMNHEERFQFPSHVTDVSEEAKDLIQRLICSRERRLGQNGIEDFKKHAFFEGLNWENIRNLEAPYIPDVSSPSDTSNFDVDDDVLRNTKSLKITNLVTACATVIIEIRVCLLCFSDRGSLKSIMQSNTLTKDEDVQRDLEHSLQMEAYERRIRRLEQEKLELSRKLQESTQTVQSLHGSSRALSNSNRDKEIKKLNEEIERLKNKIADSNRLERQLEDTVALRQEREDSTQRLRGLEKQHRVVRQEKEELHKQLVEASERLKSQAKELKDAHQQRKLALQEFSELNERMAELRAQKQKVSRQLRDKEEEMEVATQKVDAMRQEMRRAEKLRKELEAQLDDAVAEASKERKLREHSENFCKQMESELEALKVKQGGRGAGATLEHQQEISKIKSELEKKVLFYEEELVRREASHVLEVKNVKKEVHDSESHQLALQKEILMLKDKLEKSKRERHNEMEEAVGTIKDKYERERAMLFDENKKLTAENEKLCSFVDKLTAQNRQLEDELQDLAAKKESVAHWEAQIAEIIQWVSDEKDARGYLQALASKMTEELEALRSSSLGSRTLDPLWKVRRSQKLDMSARLELQSALEAEIRAKQLVQEELRKVKDANLTLERCSPWQPDFLCPLHEVAGIARLPVRVVLVLLGAATILPVMGKILMGLTAERPGPCVPEEQRTRLGTRLGSKLKDSEAKNRELLEEMEILKKKMEEKFRADTGLKLPDFQDSIFEYFNTAPLAHDLTFRTSSASEQETQAPKPEASPSMSVAASEQQEDMARPPQRPSAVPLPTTQALALAGPKPKAHQFSIKSFSSPTQCSHCTSLMVGLIRQGYACEVCSFACHVSCKDGAPQVCPIPPEQSKRPLGVDVQRGIGTAYKGHVKVPKPTGVKKGWQRAYAVVCDCKLFLYDLPEGKSTQPGVIASQVLDLRSAFGQHCPCSVNLPQLSLAKRTVTASLLGAPSKTSSLLILTENENEKRKWVGILEGLQSILHKNRLRNQVVHVPLEAYDSSLPLIKAILTAAIVGCVLQVSEATALPAALQCPSENQMKVTGPFGFVDSFSMHVKKQTRPDADRIAVGLEEGLYVIEVTRDVIVRAADCKKVHQIELAPREKIVILLCGRNHHVHLYPWSSLDGAEGSFDIKLPETKGCQLMATATLKRNSGTCLFVAVKRLILCYEIQRTKPFHRKFNEIVAPGSVQCLAVLRDRLCVGYPSGFCLLSIQGDGQPLNLVNPNDPSLAFLSQQSFDALCAVELESEEYLLCFSHMGLYVDPQGRRARAQELMWPAAPVACSCSPTHVTVYSEYGVDVFDVRTMEWVQTIGLRRIRPLNSEGTLNLLNCEPPRLIYFKSKFSGAVLNVPDTSDNSKKQMLRTRSKRRFVFKVPEEERLQQRREMLRDPELRSKMISNPTNFNHVAHMGPGDGMQVLMDLPLAAMLAETVPKAVPARLALCSDLALLSHKPVSAEALFTSTYPVTRPCAQASGRPGQ

SEQ ID NO: 9978 - protein, 118 aa, Homo sapiens
DPLWKVRRSQKLDMSARLELQSALEAEIRAKQLVQEELRKVKDANLTLERCSPWQPDFLCPLHEVAGIARLPVRVVLVLLGAATILPVMGKILMGLTAERPGPCVPEEQRTRLGTRLG

SEQ ID NO: 9979 - protein, 133 aa, Homo sapiens
  DOMAIN (77)..(108): Protein kinases ATP-binding region proteins domain identified by eMATRIX, accession number BL00107A, p-value=2.059e-20, raw score of 18.39
  DOMAIN (23)..(123): Eukaryotic protein kinase domain identified by PFam, accession name pkinase, E-value=4.8e-23, PFam score of 87.0
RRCQTACFREERDVLVNGDCQWITALHYAFQDENHLYLVMDYYVGGDLLTLLSKFEDKLPEDMARFYIGEMVLAIDSIHQLHYVHRDIKPDNVLLDVNGHIRLADFGSCLKMNDDGTVGIFVGDFPFGFGFGI

SEQ ID NO: 9980 - protein, 1765 aa, Homo sapiens
  DOMAIN (239)..(270): Protein kinases ATP-binding region proteins domain identified by eMATRIX, accession number BL00107A, p-value=9.400e-22, raw score of 18.39
  DOMAIN (127)..(400): Eukaryotic protein kinase domain identified by PFam, accession name pkinase, E-value=2.2e-50, PFam score of 180.8
  misc_feature (1)...(1765): Xaa = X or * as defined in Table 2
AGARRRGRGGEEAPLLPGLAAAEPPRARPDGLAEPAVRGRRVGSGPRGTMSAKVRLKKLEQLLLDGPWRNESALSVETLLDVLVCLYTECSHSALRRDKYVAEFLEWAKPFTQLVKEMQLHREDFEIIKVIGRGAFGEVAVVKMKNTERIYAMKILNKWEMLKRAETACFRENRDVLVNGDCQWITALHYAFQDENHLYLVMDYYVGGDLLTLLSKFEDKLPEDMARFYIGEMVLAIDPIHQLHYVHRDIKPDNVLLDVNGHIRLADFGSCLKMNDDGTVGAVPPVAVGTPDYISPEILQAMEDGMGKYGPECDWWSLGVCMYEMLYGETPFYAESLVETYGKIMNHEERFQFPSHVTDVSEEAKDLIQRLICSRERRLGQNGIEDFKKHAFFEGLNWENIRNLEAPYIPDVSSPSDTSNFDVDDDVLRNTEILPPGSHTGFSGLHLPFIGFTFTTESCFSDRGSLKSIMQSNTLTKDEDVQRDLEHSLQMEAYERRIRRLEQEKLELSRKLQESTQTVQSLHGSSRALSNSNRDKEIKKLNEEIERLKNKIADSNRLERQLEDTVALRQEREDSTQRLRGLEKQHRVVRQEKEELHKQLVEASERLKSQAKELKDAHQQRKLALQEFSELNERMAELRAQKQKVSRQLRDKEEEMEVATQKVDAMRQEMRRAEKLRKELEAQLDDAVAEASKERKLREHSENFCKQMESELEALKVKQGGRGAGATLEHQQEISKIKSELEKKVLFYEEELVRREASHVLEVKNVKKEVHDSESHQLALQKEILMLKDKLEKSKRERHNEMEEAVGTIKDKYERERAMLFDENKKLTAENEKLCSFVDKLTAQNRQLEDELQDLAAKKESVAHWEAQIAEIIQWVSDEKDARGYLQALASKMTEELEALRSSSLGSRTLDPLWKVRRSQKLDMSARLELQSALEAEIRAKQLVQEELRKVKDANLTLESKLKDSEAKNRELLEEMEILKKKMEEKFRADTGLKLPDFQDSIFEYFNTAPLAHDLTFRTSSASEQETQAPKPEASPSMSVAASEQQEDMARPPQRPSAVPLPTTQALALAGPKPKAHQFSIKSFSSPTQCSHCTSLMVGLIRQGYACEVCSFACHVSCKDGAPQVCPIPPEQSKRPLGVDVQRGIGTAYKGHVKVPKPTGVKKGWQRAYAVVCDCKLFLYDLPEGKSTQPGVIASQVLDLRDDEFSVSSVLASDVIHATRRDIPCIFRVTASLLGAPSKTSSLLILTENENEKRKWVGILEGLQSILHKNRLRNQVVHVPLEAYDSSLPLIKAILTAAIVDADRIAVGLEEGLYVIEVTRDVIVRAADCKKVHQIELAPREKIVILLCGRNHHVHLYPWSSLDGAEGSFDIKLPETKGCQLMATATLKRNSGTCLFVAVKRLILCYEIQRTKPFHRKFNEIVAPGSVQCLAVLRDRLCVGYPSGFCLLSIQGDGQPLNLVNPNDPALAFLSHSSFDALCAVELESEEYLLCFSHMGLYVDPQGRRARAQELMWPAAPVACSCSPTHVTVYSEYGVDVFDVRTMEWVQTIGLRRIRPLNSEGTLNLLNCEPPRLVFXFKSKFFGKRVFQTWPDTSDNSKKQMLRTRSKRRFVFKVPEEERLQQRREMLRDPELRSKMISNPTNFNHVAHMGPGDGMQVLMDLPLSAVPPSQEERPGPAPTNLARQPPSRNKPYISWPSSGGSEPSVTVPLRSMSDPDQDFDKEPDSDSTKHSTPSNSSNPSGPPSPNSPHRSQLPLEGLEQPACDT

SEQ ID NO: 9981 - protein, 253 aa, Homo sapiens
  DOMAIN (97)..(110): GLUTELIN SIGNATURE domain identified by eMATRIX, accession number PR00211G, p-value=8.096e-10, raw score of 5.77
  misc_feature (1)...(253): Xaa = X or * as defined in Table 2
MEKIPILRSLRAREQQAGKDVTLQGEHQHLPEPGCQQTVPLSVGRRPPDTPGPETNSMEAAPGSPPGEGCPACSRCLRWEPPPGRPCEXPEESPAGTPAPCPCGSPGGPAAQSLPPLPGPLPQPSRPSPASGPAPGHRHPEGGAGQAAEGQGPRGQPRSSLQTSPPRPLAAPVPMAPRGLAWQDVSEPPPGCSGLNSSQKSPLSERPGPPVSGEAGPDGSSHSAQRLQPPNRAGSGLESVSVSLEGQSRGARD

SEQ ID NO: 9982 - protein, 547 aa, Homo sapiens
  DOMAIN (424)..(464): Cyclophilin-type peptidyl-prolyl cis-trans isomerase signatur domain identified by eMATRIX, accession number BL00170B, p-value= 3.455e-27, raw score of 20.97
  DOMAIN (383)..(475): Cyclophilin type peptidyl-prolyl cis-tr domain identified by PFam, accession name pro_isomerase, E-value=4.2e-38, PFam score of 134.5
  misc_feature (1)...(547): Xaa = X or * as defined in Table 2
MKVCSSIAEVSDTTNPPSRTNSGHMTSVLKQALKDPCRTRHYRLVLWTLERTEVLDLFIERFCMTGGNSPICYLKAYHTNLYLSADAEKVREAIDEGIAAATIFSPSRDVVVSQSQLRVAFDGDAVLFSDESERIVKATLDRFFEHEKAHENKPLAQEQGSTSFPDKVEAFRSPSVPLPITGHSANVYQTPTCARRRTTRPLVNWELIPRDNPPLPPRQAFRDLGQSPAFSDAVATTSAVPFGGDCHLSEVRGAETRQPAFAMKRPKEPSGSDGESDGPIDVGQEGQLRSSKLEKAEVLQMTVDHLKMLHATGGTGFFDARALAVDFRSIGFRECLTEVIRTPTIWLLPGRSKAVESQSQQFTGAHSTLGEPTAKKAXSNPQVYMDIKIGNKPAGCIQTLLRSDVVPMTTENFLYMCTHSKGLGFKGSSFHRIIPQFICQGSDFTNHGGTRGKSIYKKKFDDENFIFKHTGPGLRRHGTKCPMAHLALMEASKGQDQHPLLRRKERAQQVHDVVKLTRGRGRGISLKRIARSLCKDKETGLCTLTWH

SEQ ID NO: 9983 - protein, 316 aa, Homo sapiens
  DOMAIN (251)..(296): Cyclophilin-type peptidyl-prolyl cis-trans isomerase signatur domain identified by eMATRIX, accession number BL00170C, p-value= 1.000e-39, raw score of 18.49
  DOMAIN (161)..(302): Cyclophilin type peptidyl-prolyl cis-tr domain identified by PFam, accession name pro_isomerase, E-value=8.4e-94, PFam score of 325.0
LLLLGHASTSTGGGGKRASKMATTKRVLYVGGLAEEVDDKVLHAAFIPFGDITDIQIPLDYETEKHRGFAFVEFELAEDAAAAIDNMNESELFGRTIRVNLAKPMRIKEGSSRPVWSDDDWLKKFSGKTLEENKEEEGSEPPKAETQEGEPIAKKARSNPQVYMDIKIGNKPAGRIQMLLRSDVVPMTAENFRCLCTHEKGFGFKGSSFHRIIPQFMCQGGDFTNHNGTGGKSIYGKKFDDENFILKHTGPGLLSMANSGPNTNGSQFFLTCDKTDWLDGKHVVFGEVTEGLDVLRQIEKQEESAITSQPRSWKLT

SEQ ID NO: 9984 - protein, 51 aa, Homo sapiens
LLLPPPFPGSSPWLNLHLHAALDHLPRPAAITCQKQGESAITSQPRSWKLT

SEQ ID NO: 9985 - protein, 136 aa, Homo sapiens
  DOMAIN (55)..(95): Cyclophilin-type peptidyl-prolyl cis-trans isomerase signatur domain identified by eMATRIX, accession number BL00170B, p-value= 7.857e-14, raw score of 20.97
  DOMAIN (14)..(81): Cyclophilin type peptidyl-prolyl cis-tr domain identified by PFam, accession name pro_isomerase, E-value=2.2e-25, PFam score of 90.9
  misc_feature (1)...(136): Xaa = X or * as defined in Table 2
GEPTAKKAXSNPQVYMDIKIGNKPAGCIQTLLRSDVVPMTTENFLYMCTHSKGLGFKGSSFHRIIPQFICQGSDFTNHGGHQGSAQHGTKCPMAQFGPHGGLKRAGPAPSSTGKERAQQKQGESAITSQPRSWKLT

SEQ ID NO: 9986 - protein, 600 aa, Homo sapiens
  DOMAIN (508)..(534): C2 domain proteins domain identified by eMATRIX, accession number PF00168C, p-value=7.375e-09, raw score of 27.49
  misc_feature (1)...(600): Xaa = X or * as defined in Table 2
PRPANLLKKGGQITMSATVVDAVNAAPLSGSKEMSLEEPKKMTREDWRKKKELEEQQKLGNAPAEVDEEGKDINPHIPQYISSVPWYIDPSKRPTLKHQRPQPEKQKQFSSSGEWYKRGVKENSIITKYRKGACENCGAMTHKKKDCFERPRRVGAKFTGTNIAPDEHVQPQLMFDYDGKRDRWNGYNPEEHMKIVEEYAKVDLAKRTLKAQKLQEELASGKLVEQANSPKHQWGEEEPNSQTEKDHNSEDEDEDKYADDIDMPGQNFDSKRRITVRNLRIREDIAKYLRNLDPISAYYDPKTRAMRENPYANAGKNPDEVSYAGDNFVRYTGDTISMGQTQVFAWEAYDKGSEVHLQADPTKLELLYKSFKVKKEDFKEQQKESILEKYGGQEHLDAPPAELLLAQTEDYVEYSRHGTVIKGQERAVACSKYEEDVKIHNHTHIWGSYWKEGRRGNKCCHSFSKYSYCTGEAGKEIVNSEECIINEITGEESVKKPQTLMELHQEKLKEEKKKKKKKKKKHRKSSSDSDDEEKKHEKLKKALNAXEARLLHVKETMQIDERKRPYNSMYXTSRPIEEEMEAYRMKRQRPDDPMASFLGQ

SEQ ID NO: 9987 - protein, 130 aa, Homo sapiens
  DOMAIN (47)..(58): Trp-Asp (WD) repeat proteins proteins domain identified by eMATRIX, accession number BL00678, p-value=3.842e-09, raw score of 9.67
  DOMAIN (20)..(108): WD domain, G-beta repeat domain identified by PFam, accession name WD40, E-value=3.5e-12, PFam score of 53.9
  misc_feature (1)...(130): Xaa = X or * as defined in Table 2
ITLGPDSIIGIWSGNQHKQDPYIASMEHHTDWVNDIVLCCNGKTLISASSDTTVKVWNAHKGFCMSTYKDTXASSLSGNKDSIYSLAMNQLGTIIVSGSTEKVLRVWDPRTCAKLMKLIGHTDNVKALLL

SEQ ID NO: 9988 - protein, 143 aa, Homo sapiens
  misc_feature (1)...(143): Xaa = X or * as defined in Table 2
GVGVCFFPVPSSLRVLGRWAAFCALPGRSLRKSRSLWGWTGHTQSXEGELPWKAGWQRCFWRGGGRQTLPLTCSPRTRGCRAAQEGAGCKARGAWWVRSPGRAGRPLRRGGSRVTLNSQMGSDATGETEWIKEMKPKKKKKMS

SEQ ID NO: 9989 - protein, 215 aa, Homo sapiens
MAGALVRKAADYVRSKDFRDYLMRVTQQPYKVFNSGPWAFSSSSYMSRPSAHISSLIVSRVGSSSTSFQGGLGAGMGVEPLDPHENLYVDFYRGFIHNCQNLEANKMSFGRSQSEKAAYYLVPTTQRSGKGKIMELVERSVVARVEHFWGPVANWGLPIAAINDMKKSPEIISGRMTFVQPRNWLLFACHATNEVAQLIQGGRLIKHEMTKTASA

SEQ ID NO: 9990 - protein, 129 aa, Homo sapiens
FRAAGGLAGVSLALGSGSRGRDHSGSGVGTAMAGALVRKAADYVRSKDFRDYLMSTVRKLFPSISGFCRLSALTELGVTGLASFAYESLSSRHGWQVVKGAYCTLACPGEPRHELCDSHAPGAAPYSCF

SEQ ID NO: 9991 - protein, 173 aa, Homo sapiens
  misc_feature (1)...(173): Xaa = X or * as defined in Table 2
LAVGCRGVGLGVIGSGKRQQRQGPLGVSVSAQPCAGALVRKAADYVQSKDFRDYLMSTHFWGPVANWGLPIAAINDMKKSPGDYSVGRMTFALCCYSLTFMEILPYKVQIXPLNWLLCFACHGTNEVRPSFIQGEGRLIPNTRMDLKRASGINQWGKGKNKVFEGDSLCPGCC

SEQ ID NO: 9992 - protein, 53 aa, Homo sapiens
QCAEKIASNPKIVVAMAKESVNAAFKITLPEGDDRKEGMTPFVEKRKANFKDQ

SEQ ID NO: 9993 - protein, 65 aa, Homo sapiens
  DOMAIN (21)..(48): Enoyl-CoA hydratase/isomerase proteins domain identified by eMATRIX, accession number BL00166C, p-value=3.400e-30, raw score of 18.93
  DOMAIN (2)..(64): Enoyl-CoA hydratase/isomerase family domain identified by PFam, accession name ECH, E-value=0.0099, PFam score of -51.2
FPGCYSSKFLKHWDHLTQFKKPVIAAVNGYAFGGGCELAMMCDIIYAGEKAQFAQPERTSAACQF

SEQ ID NO: 9994 - protein, 159 aa, Homo sapiens
  DOMAIN (26)..(62): Enoyl-CoA hydratase/isomerase proteins domain identified by eMATRIX, accession number BL00166D, p-value=9.036e-24, raw score of 22.87
  DOMAIN (1)..(127): Enoyl-CoA hydratase/isomerase family domain identified by PFam, accession name ECH, E-value=0.00076, PFam score of -37.7
  misc_feature (1)...(159): Xaa = X or * as defined in Table 2
CLLGFTHHSASHDQPLPAGAGGTQRLTRAVGKSLAMEMVLTGDRISAQDAKQAGLVSMICAVETLXCLLGFTHHSASHDQPLPAGAGGTQRLTRAVGKSLAMEMVLTGDRISAQDAKQAGLVSMICAVETLVGGAIQCAEKIASNSKIVVAMAKESVNA

SEQ ID NO: 9995 - protein, 492 aa, Homo sapiens
  DOMAIN (201)..(228): Enoyl-CoA hydratase/isomerase proteins domain identified by eMATRIX, accession number BL00166C, p-value=3.400e-30, raw score of 18.93
  DOMAIN (122)..(291): Enoyl-CoA hydratase/isomerase family domain identified by PFam, accession name ECH, E-value=4.9e-82, PFam score of 286.0
  misc_feature (1)...(492): Xaa = X or * as defined in Table 2
EATLTRPRPAGGPAAGWYCPSAKTSGQLGAGFTFSPLERHCPLSPSHLAVHPAGAGPVQQANREAPASPIFGLACCSGPVPDLNAAGTPRIFTSPTLRPLARGANFEYIIAEKRGKNNTVGLIQLNRPKALNALCDGLIDELNQALKTFEEDPAVGAIVLTGGDKAFAAGADIKEMQNLSFQDCYSSKFLKHWDHLTQVKKPVIAAVNGYAFGGGCELAMMCDIIYAGEKAQFAQPEILIGTIPGAGGTQRLTRAVGKSLAMEMVLTGDRISAQDAKQAGLVSKICPFXDTGWKEAIQFAEKIASNSKIVVAMAKESVNAGRSPNLSECIYLEGVAVPRACRWLEAGYSEESILKERRLLSPEVFGKVVLPWERMLAPALEPQRLPPSAHLDLLCLASCKERAWNEQSQRRSWCRPRPALALVLSFLVFILGYFSLFAAPLPPHSLSSRAQFAISPFIQFLSLLGAVGYRSVTFGGHSRAVGSARSPLGQCL

SEQ ID NO: 9996 - protein, 310 aa, Homo sapiens
  DOMAIN (138)..(165): Enoyl-CoA hydratase/isomerase proteins domain identified by eMATRIX, accession number BL00166C, p-value=5.140e-16, raw score of 18.93
  DOMAIN (55)..(241): Enoyl-CoA hydratase/isomerase family domain identified by PFam, accession name ECH, E-value=7.3e-13, PFam score of 56.2
  misc_feature (1)...(310): Xaa = X or * as defined in Table 2
GRGVQRAMAALRVLLSCARGPLRPPVRCPAWRPFASGANFEYIIAEKRGKNNTVGLIQLNRPLPVNWLCDCLIDXLNQGLKIFEEDPAVGAIVLTGGDKAFAAGADIQGKLQNLEFSRDCYSSKFFGRHWGPPSPRVKKPVIAAVNGYAFGGGCELCHXCVDIILYAGEKAQFAQPEILIGNLPRVRGGTQEDSPVPVGKSLAMEMVLTGDPDPQPQDAQASRVLSSKICPVETLVEEAIQCAEKIASNSKIVVAMAKESVNAAFEMTLTEGSKLEKKLFYFNLWPLDDRERRGXPRFVGKEKGPTFKDQ

SEQ ID NO: 9997 - protein, 128 aa, Homo sapiens
  DOMAIN (23)..(128): Protein of unknown function DUF101 domain identified by PFam, accession name DUF101, E-value=4.7e-07, PFam score of 25.5
  misc_feature (1)...(128): Xaa = X or * as defined in Table 2
VRDYNLTEEQKAIKAKYPPVNRKYEYLDHTADVQWIVLHRAXIYFFRLHAWGDTLEEAFEQCAMAMFGYMTDTGTVEPLQTVEVETQGWGEEFSLSKHPQGTEVKAITYSAMQVYNEENPEVFVIIDI

SEQ ID NO: 9998 - protein, 349 aa, Homo sapiens
  DOMAIN (263)..(274): Trp-Asp (WD) repeat proteins proteins domain identified by eMATRIX, accession number BL00678, p-value=4.600e-10, raw score of 9.67
  DOMAIN (59)..(318): WD domain, G-beta repeat domain identified by PFam, accession name WD40, E-value=9.5e-35, PFam score of 128.9
  misc_feature (1)...(349): Xaa = X or * as defined in Table 2
FRVNMQDGGPSPAEHSKAEESAGMEARFLGLPDAAGSSGPTPARRCPAPRPAGVSYVIRDEVEKYNRNGVNALQLDPALNRLFTARRDSIIRIWRVNQHKQDPYIASMEHHTDWVNDIVLCCNGKTLISASSDTTVKVWNAHKGFCMSTLRTHKDYVKALAYAKGXELVASAGLDRQIFLWDVNTLTALTASNNTVTTSSLSGNKDSIYSLAMNQLGTIIVSGSTEKVLRVWDPRTCAKLMKLKGHTDNVKALLLNRDGTQCLSGSSDGTIRLWSLGQQRCIATYRVHDEGVWALQVNDAFTHVYSGGRDRKIYCTDLRNPDIRVLICEEKAPVLKMELDRSADPPPAI

SEQ ID NO: 9999 - protein, 110 aa, Homo sapiens
  DOMAIN (1)..(110): Protein of unknown function DUF101 domain identified by PFam, accession name DUF101, E-value=9e-06, PFam score of 8.3
  misc_feature (1)...(110): Xaa = X or * as defined in Table 2
RDYNLTEEQKAIKAKYPPVNRKYEXDDLQSLLFHFLDEWLYKFSADEFFIPREVKVLSIDQRNFKLRSIGWGEEFSLSKHPQGTEVKAITYSAMQVYNEENPEVFVIIDI

SEQ ID NO: 10000 - protein, 140 aa, Homo sapiens
  DOMAIN (32)..(140): Protein of unknown function DUF101 domain identified by PFam, accession name DUF101, E-value=7.3e-15, PFam score of 62.8
SFMAQEEEDVRDYNLTEEQKAIKAKYPPVNRKYEYLDHTADVQLHAWGDTLEEAFEQCAMAMFGYMTDTGTVEPLQTVEVETQVHADEFFIPREVKVLSIDQRNFKLRSIGWGEEFSLSKHPQGTEVKAITYSAMQVYNE

SEQ ID NO: 10001 - protein, 168 aa, Homo sapiens
  DOMAIN (56)..(168): Protein of unknown function DUF101 domain identified by PFam, accession name DUF101, E-value=9.1e-15, PFam score of 62.5
  misc_feature (1)...(168): Xaa = X or * as defined in Table 2
LKNRRRSRPSIRQSIGSTSVSRWLTSLFTYLDHTADVQXVXREFIPLKPRQXEDXMFQSWLHAWGDTLEEAFEQCAMAMFGYMTDTGTVEPLQTVEVETQGDDLQSLLFHFLDEWLYKFSADEFFIPGWGEEFSLSKHPQGTEVKAITYSAMQVYNEENPEVFVIIDI

SEQ ID NO: 10002 - protein, 192 aa, Homo sapiens
  DOMAIN (3)..(186): Protein of unknown function DUF101 domain identified by PFam, accession name DUF101, E-value=0.00031, PFam score of -12.2
  misc_feature (1)...(192): Xaa = X or * as defined in Table 2
IYFFRLHAWGDTLEEAFEQCAMAMFGYMTDTGTVEPLQTVEVETQGKXLQVLLFHFWDEWLYKFSADEFFIPGKLCAIVFXKRLXRPGAVAYACNPSTLGSRGRWITXGQEFETSLTNKEVKVLSIDQRNFKLRFNGWGEEFSLSKHPQGTEVKAITYSAMQVYNEENPGSFCDHWTFKTTQKIKRLPTGKK

SEQ ID NO: 10003 - protein, 42 aa, Homo sapiens
  misc_feature (1)...(42): Xaa = X or * as defined in Table 2
LKKEKSLMEKHFFXQTDSSVSNLEKNHEPSDIVNSLQWAMVS

SEQ ID NO: 10004 - protein, 93 aa, Homo sapiens
  DOMAIN (52)..(85): Alpha-2-macroglobulin family thiolester region proteins domain identified by eMATRIX, accession number BL00477L, p-value= 8.603e-17, raw score of 23.51
  DOMAIN (8)..(84): Alpha-2-macroglobulin family domain identified by PFam, accession name A2M, E-value=9.1e-17, PFam score of 56.7
TLKYTGIRNKSSMVVIDVKMLSGFTPTMSSIEELENKGQVMKTEVKNDHVLFYLENSNLVFNIQPAPAMVYDYYEKEEYALAFYNIDSSSVSE

SEQ ID NO: 10005 - protein, 114 aa, Homo sapiens
  DOMAIN (72)..(96): Alpha-2-macroglobulin family thiolester region proteins domain identified by eMATRIX, accession number BL00477K, p-value= 9.816e-15, raw score of 17.42
  DOMAIN (23)..(114): Alpha-2-macroglobulin family domain identified by PFam, accession name A2M, E-value=1.7e-08, PFam score of 29.1
NPQSSRYLPWADLSFLLGHPIPTVLQATLKYNVLLPKKASGFSLSLEIVKNYSLTVFDLTVNLKYTGIRNKSSMVVIDVKMLSGFTPTMSSIEELENKGQVMKTEVKNDHVLFY

SEQ ID NO: 10006 - protein, 1200 aa, Homo sapiens
  DOMAIN (774)..(806): Alpha-2-macroglobulin family thiolester region proteins domain identified by eMATRIX, accession number BL00477G, p-value= 2.650e-17, raw score of 19.43
  DOMAIN (30)..(485): Alpha-2-macroglobulin family N-terminal regi domain identified by PFam, accession name A2M_N, E-value=6.9e-95, PFam score of 323.7
MPRPASARTRCAHPLTCAHCPALPSEMNPDPQNNRIFQRQNVTSFRNITQLSFQLISEPMFGDYWIVVKRNSRETVTHQFAVKRYVLPKFEVTVNAPQTVTISDDEFQVDVCAKYNFGQPVQGETQIRVCREYFSSSNCEKNENEICEQFIAQLENGCVSQIVNTKVFQLYRSGLFMTFHVAVIVTESGTVMQISEKTSVFITQLLGTVNFENMDTFYRRGISYFGTLKFSDPNNVPMVNKLLQLELNDEFIGNYTTDENGEAQFSIDTSDIFDPEFNLKATYVRPESCYLPSWLTPQYLDAHFLVSRFYSRTNSFLKIVPEPKQLECNQQKVVTVHYSLNSEAYEDDSNVKFFYLMMVKGAILLSGQKEIRNKAWNGNFSFPISISADLAPAAVLFVYTLHPSGEIVADSVRFQVDKCFKHKVNIKFSNEQGLPGSNASLCLQAAPVLFCALRAVDRNVLLLKSEQQLSAESVYNMVPSIEPYGYFYHGLNLDDGKEDPCIPQRDMFYNGLYYTPVSNYGDGDIYNIVRNMGLKVFTNLHYRKPEVCVMERRLPLPKPLYLETENYGPMRSVPSRIASSGIRGENADYVEQAIIQTVRTNFPETWMWDLVSVDSSGSANLSFLIPDTITQWEASGFCVNGDVGFGISSTTTLEVSQPFFIEIASPFSVVQNEQFDLIVNVFSYRNTCVEISVQVEESQNYEANIHTLKINGSEVIQAGGRKTNVWTIIPKKLGAKASKQGVLDLPNDVVEGSARGFFTVVGDILGLALQNLVVLQMPYGSGEQNAALLASDTYVLDYLKSTEQLTEEVQSKAFFLLSNAALDSGVTNGYNHAILAYAFALAGKEKQVESLLQTLDQSAPKLNNVIYWERERKPKTEEFPSFIPWAPSAQTEKSCYVLLAVISRKIPDLTYASKIVQWLAQRMNSHGGFSSNQAPVDCKRPAFFVIPAAFGPLSDSKSQDQNTVTFSSEGSSEIFQVNGHNRLLVQRSEVTQAPGEYTVDVEGHGCTFIQATLKYNVLLPKKASGFSLSLEIVKNYSSTAFDLTVTLKYTGIRNKSSMVVIDVKMLSGFTPTMSSIEEGFGRADSFPFSVEQSNLVFNIQPAPAMVYDYYEKGLIQRCPSRWSKGIACAEDRPGRPMLASLLTSMAMAQEAFRSSCSGGSAWKLGQAVRERLPEPSVCHPRGTGWALGTCSLPLPELKPE

SEQ ID NO: 10007 - protein, 65 aa, Homo sapiens
  DOMAIN (10)..(43): Alpha-2-macroglobulin family thiolester region proteins domain identified by eMATRIX, accession number BL00477L, p-value= 6.494e-11, raw score of 23.51
GFGRADSFPFSVEQSNLVFNIQPAPAMVYDYYEKGLIQRCPSRWSKGIACAEDRPGRPMLASLLT

SEQ ID NO: 10008 - protein, 321 aa, Homo sapiens
  DOMAIN (65)..(89): Alpha-2-macroglobulin family thiolester region proteins domain identified by eMATRIX, accession number BL00477K, p-value= 4.879e-12, raw score of 17.42
  DOMAIN (62)..(80): Alpha-2-macroglobulin family domain identified by PFam, accession name A2M, E-value=0.0028, PFam score of 11.8
MGVTRARGEVGLALSSRLAATLKYNVLLPKKASGFSLSLEIVKNYSLTVFDLTVNLKYTGIRNKSSMVVIDVKMLSGFTPTMSSIEEEKLKSFPVCVSAKLEPKDDMEEALGGSPQVSMLLVNIREILCSRKWSRRVYKKSVFPDGLAGAVTKTHVMLGVETDKLFSAPCPSVREQLEQKVEREGQRTTSTCQTWAKSPKVDVPSYLTCLADLKYGASLGPSITHSALAPGSSRSSPAPATAVQGAGQDDSSSIPFRRELSEATSVSFLDPWRIFCGVVSCLFTSGAGEGPGGESPYVRQQTVSANPQQPQAEEEEDNWKS

SEQ ID NO: 10009 - protein, 78 aa, Homo sapiens
  DOMAIN (15)..(43): !!!! PROTEIN ALU SUBFAMILY WARNING ENTRY NUCLEAR PHOSPHO domain identified by eMATRIX, accession number PD02454B, p-value= 6.677e-18, raw score of 11.61
  misc_feature (1)...(78): Xaa = X or * as defined in Table 2
FPAFWESQVRWIASASGVQDQPDQYGEILFLLKLQKLGGHGGIRXEDHLSLGGQGCKEPRLYHCTPAWVTEHYLVSKK

SEQ ID NO: 10010 - protein, 123 aa, Homo sapiens
  misc_feature (1)...(123): Xaa = X or * as defined in Table 2
FPNSSRLIWPECNRIKEESLVSASPGSFCKPHLDLALGLGLGVGLMVELGLKLGLFLGLGFDLGVGLGIGLGVKLGLSDGYGLGFRLGLGLXAGLVLGLGIRVGLKPGLGLEIFVGLILCICI

SEQ ID NO: 10011 - protein, 66 aa, Homo sapiens
  misc_feature (1)...(66): Xaa = X or * as defined in Table 2
DLTRNHSPLQTVHDVRWFMIFFQVXYRRIKFVKRNASPSGIXNIIXTINTFVCIYKXIFRYKNMHI

SEQ ID NO: 10012 - protein, 233 aa, Homo sapiens
  DOMAIN (95)..(119): Alpha-2-macroglobulin family thiolester region proteins domain identified by eMATRIX, accession number BL00477K, p-value= 6.318e-10, raw score of 17.42
  DOMAIN (21)..(191): Alpha-2-macroglobulin family domain identified by PFam, accession name A2M, E-value=1.3e-09, PFam score of 32.8
  misc_feature (1)...(233): Xaa = X or * as defined in Table 2
NPQSSSSEGSRXDFPRLTVTNRLLVQRSEVTQAPGQYTVDVEGHGCTFIQATLKYNVLLPKKASGFSLSLEISKELLFDCFXPRQVNLQYTGIRNKSSMVVIDVKMLSGFTPNPCHPIEELENKGQSDEDXKSKNDPCSFSYLENVFGQPDSFPFFCXAEQPLCSTFQPGPSHGLTDYYEKEEYALAFYQHRTVVPVSEXDKAITRRVGEAISCNKLILLYQTWKKIMNHLTS

SEQ ID NO: 10013 - protein, 168 aa, Homo sapiens
  misc_feature (1)...(168): Xaa = X or * as defined in Table 2
ETPAPCLQAWVPQACREGPLAFRELLGGVLALSTPGERCSVSVSEFETRARCTQPCWGPSPKFLSPPHAKPAITLRPELKEAPWPAPSLGPPGGLSTPPSGIPCPPQCCQGHVALCRGLRPSPWXTEXPVCWKMPRCPEKLPPGIFGNETYLVPIVNWPTGTSFLSTY

SEQ ID NO: 10014 - protein, 131 aa, Homo sapiens
  misc_feature (1)...(131): Xaa = X or * as defined in Table 2
WKESQGRCEWXVARGLXADLTXGFHWHLPGAPPWGLLTGGGQGRGHGHRGGWALSGRPPRGFHWHLPGAPPWGLLTGGGQGRGHGHRGGWALSGIPPRLQSFQVWAESPLPQLPWGCVAGISVHTGVSWLP

SEQ ID NO: 10015 - protein, 265 aa, Homo sapiens
  DOMAIN (85)..(234): Keratin, high sulfur B2 protein domain identified by PFam, accession name Keratin_B2, E-value=0.022, PFam score of -42.4
  misc_feature (1)...(265): Xaa = X or * as defined in Table 2
GRAEQTSDTHFFASTSACSHNLTMSCPNYCSGNSNSGSLRTSRHIPLTSIDLCPTSVSCGDVLYLPTSSQDHTWVTDNCQETCGEPTSCQPVHCETGNLETSCGSSHCCTTCPGPCQGSSFLPASFFSSSCLPVSCRTTEVCRPAAVRPLRAVVQXFTSPXGDCVAQCLRPQFCLSKSCQPQNLLTSGCQPSSCLAYRPQSLHVVSSSLRPLGPLFSGCQPLTHVFSTVSSHLALEHGSPNICFLQSSILLHRSSSRAVCSSALF

SEQ ID NO: 10016 - protein, 159 aa, Homo sapiens
VEKLVKGKFQDNFEFIQWSKKFFDANYDGKDYNPLLARQGQDVAPPPNPVPQRTSPTGPPPCILRKNPPSARNGGHETDAQILELNQQLVDLKLTVDGLEKERDFYFSKLRDIELICQEHESENSPVISGIIGILYATEEGFAPPEDDEIEEHQQEDQD

SEQ ID NO: 10017 - protein, 133 aa, Homo sapiens
  misc_feature (1)...(133): Xaa = X or * as defined in Table 2
LFSSGAVPQRTSPHQAPKNMQTSGRLSNVAPPCILRKNPPSARNGGHETXCPNSLNSNQQLVDLKLTVDGLEKERDFYFSKLRDIELICQEHESENSPVISGIIGILYATEEGFAPPEDDEIEEHQQEDQDEY

SEQ ID NO: 10018 - protein, 1317 aa, Homo sapiens
MSSKHLKSEQIKDQIRVPVISLIPKIHSAQEEQLSSTAVCSCPARVFCAVTKVVAVFQMWMLHDLVQMVPRSLQWLPHIFTLFSNPLILYHSHELSAPSFAEQRECKLAYMPVSSASAHHLLLQAFDFNLSVSLSSLARNMLANSASVRILIKGGKVVNDDCTHEADVYIENGIIQQVGRELMIWRGQGKLVIPGGIDTSTHFHQTFMNATCVDDFYHGTKVMLLFAKGGFLFGFFILLLGLLQTRLMASLAKSDWFSPENHQLFTADEELCTRVFMQGGPGAEVTCLENLQNCYPYPCESHIQVILGLHGGSMCSCNPDHKHPFMSGALRSIMKRQNKEQVPPPAVEPKKPGNKKQPKKVATPPNQNQKQGRFRSLEEALKALDVADLQKELDKSQSVFSGNPSIWLKDLASYLNYKLQAPLSEPTLSQHTHDYPYSLVSRELRGIIRGLLAKAAGSLELFFDHCLFTMLQELDKTPGESLHGYRICIQAILQDKPKIATANLGKFLELLRSHQSRPAKCLTIMWALGQAGFANLTEGLKVWLGIMLPVLGIKSLSPFAITYLDRLLLMHPNLTKGFGMIGPKDFFPLLDFAYMPNNSLTPSLQEQLCQLYPRLKVLAFGAKPDSTLHTYFPSFLSRATPSCPPEMKKELLSSLTECLTVDPLSASVWRQLYPKHLSQSRQVQKSLQETIQSLKLTNQELLRKGSRNNQDVVTCAMACKGLLQQVQGPRLPWTRLLLLLLVFAVGFLCHDLRSHSSFQASLTGRLLRSSGFLPASQQACAKLYSYSLQGYSWLGETLPLWGSHLLTVVRPSLQLAWAHTNATVSFLSAHCASHLAWFGDSLTSLSQRWQLTMTIFLEKRNYLAKGQSLRTAGQENWPVFKESTSGEAKGNVEQEQPKWPIGSRAGFARRGRKAPVSAGRPLTVFRKTLLEPSGRSCPPSSPNDTRSATCFPRSPIVGNSMIRCWVLKGAIFSSFLHTGTAATHGTLESDRSWGMAVNVYSTSVTSENLSRHDMLAWVNDSLHLNYTKIEQLCSGAAYCQFMDMLFPGCVHLRKVKFQAKLEHEYIHNFKVLQAAFKKMGVDKVGACALGGPEEQCDPGEEEDPPAQATGAAGVIPIIPVEKLVKGKFQDNFEFIQWFKKFFDANFDGKDYNPLLARQGQRDVAPPPNPGDQIFNKSPKKLIGTASVPQRTVPPTGPKKHARPSGRLSNVAPPCILPEESLPSARNGGHETDAQILELNQQLVDLKLTSGWGWEKERDFLLQANFRDIELICQEHESENSPVISGIIGHPLMPQRKGFAPPEDDEIEEHQQEDQDEY

SEQ ID NO: 10019 - protein, 87 aa, Homo sapiens
  misc_feature (1)...(87): Xaa = X or * as defined in Table 2
NPRCGPGGSRFVSSWCSVFPEAGGGXRKEPGMRGAGYKQRGMGSXSKGPFAFIMPFPRPRPGFVLPPPPHLPDLNKGPHFSQKKKKK

SEQ ID NO: 10020 - protein, 70 aa, Homo sapiens
  DOMAIN (4)..(23): ETS DOMAIN SIGNATURE domain identified by eMATRIX, accession number PR00454C, p-value=5.065e-22, raw score of 11.24
  DOMAIN (1)..(40): Ets- domain identified by PFam, accession name Ets, E-value= 2.7e-26, PFam score of 86.4
WGIQKNRPAMNYDKLSRSLRYYYEKGIMPKVAGERYSYKIVCEPEALFSLAFPELAVPAQPFGPKGGYSY

SEQ ID NO: 10021 - protein, 123 aa, Homo sapiens
  misc_feature (1)...(123): Xaa = X or * as defined in Table 2
FMINPPNQVGRYRNIINLTTNIYQKPLAPVILHGEIFKIFLTGIGVTQRYPLSPLPFKVFLAALDRKXREGAGEEVNGIENKRIKLSFVSDMIVYVENSKEKNGQLLELMRGICKTATKLQKL

SEQ ID NO: 10022 - protein, 24 aa, Homo sapiens
LLSAAQVPDSDEQFVPDFHSENRE

SEQ ID NO: 10023 - protein, 591 aa, Homo sapiens
  DOMAIN (442)..(493): Ets-domain proteins domain identified by eMATRIX, accession number BL00345B, p-value=1.000e-40, raw score of 21.28
  DOMAIN (416)..(495): Ets- domain identified by PFam, accession name Ets, E-value= 5.1e-61, PFam score of 196.1
  misc_feature (1)...(591): Xaa = X or * as defined in Table 2
NCLLRPKNKSVRWGPGAGAALLRPSPAALGAGSRACSVPPAAPAQTPRPQVSAPAWGPGRAARGSGRMERRMKAGYLDQQVPYTFSSKSPGNGRLARTLIGPLGKLMDPGSLPPLDSEDLFQDLSHFQETWLAEAQVPDSDEQFVPDFHSENLAFHSPTTRIKKEPQSPRTDPALSCSRKPPLPYHHGEQCLYSSAYDPPRQIANQVPCPWCPLDSRPYSPFPGQSNGISXDPLAPPSPTLAMGTSGNIAPSSSSPWDICHSFTSQGGAPGHPSQAPYQHQLSEPCPPYPQQSFKQEYHDPLYGTGGASQAVGTRGGGSMGAQRYPGAGVVIKQEQTDFAYDSDVTGCASMYLHTEGFSGPSPGDGAMGYGYEKPLRPFPDDVCVVPEKFEGDIKQEGVGAFREGPPYQRRGALQLWQFLVALLDDPTNAHFIAWTGRGMEFKLIEPEEVARLWGIQKNRPAMNYDKLSRSLRYYYEKGIMQKVAGERYVYKFVCEPEALFSLAFPDNQRPALKAEFDRPVSEEDTVPLSHLDESPAXPPYSGLAPRPSVRAPGHARYPPRLQPRRPGLRSRPPLGAPAVRREGAAGWSGG

SEQ ID NO: 10024 - protein, 109 aa, Homo sapiens
  misc_feature (1)...(109): Xaa = X or * as defined in Table 2
GFGVGTTPALTCPVTPSYSPKARPSXTELEPPSRCPQPCQTLGPQAEGNQMSSAPSLASPPSKQPPLMANRCCCVPRSRIHLCGIQNRLGFWDSREERGGDATWVSVSD

SEQ ID NO: 10025 - protein, 191 aa, Homo sapiens
  misc_feature (1)...(191): Xaa = X or * as defined in Table 2
GADGGGAFRLSGPGPXAPPGPSSALMMPSSCPWRTGALGPSPAGSRALGRCTSSVGPGSRWLTRTSSPGCAYQNLENDEDGAQASPEPDGGVGTRLGPGIPAEPSIRSFPVVLQHHSAAAPSAPTTPAAAGPNTLXSRRTAEWCWPPSCSCCLGPGADPGRRGNWRRPPLPRCLQRQSSSCRAFLLLVPGV

SEQ ID NO: 10026 - protein, 52 aa, Homo sapiens
  misc_feature (1)...(52): Xaa = X or * as defined in Table 2
LFLETESCFVAQAGARWAVITHCSLKLLGPCNPPISALXVARTTGMSHHTEP

SEQ ID NO: 10027 - protein, 112 aa, Homo sapiens
  misc_feature (1)...(112): Xaa = X or * as defined in Table 2
INKEMSGQARWLTPVIPALWEVKVVDHLRPGVRDHQPGQQSETPVSTTIQKXARYGGMCLXSXLLRRLTQQNHLNQGGRGCSELRSRYCTPAWARQSKTSSQEKKKEKEMPW

SEQ ID NO: 10028 - protein, 54 aa, Homo sapiens
LFHCFHFHGGPRVGSGGPFLTSSVPDEELVKSFPQSTVLVIKDAPIVGLMLWSK

SEQ ID NO: 10029 - protein, 615 aa, Homo sapiens
MWESLELPRDLLNGFAQNADSNMDNKVQAEVVLDGDGELVGNWSKGLPGCKASVLTLLKVRCQATERRVLQQCTGCGLWLLQVPWTTALGSTAPAAGLHGWLLNFDCSIVSIFMGVQGWDLAACNKKEAKVLLHEAQFMGLGSSVMLQPFDYDPNEKSKHKFMVQTIFAPPNTSDMEAVRCPSQSPAKLHGWSHRARARRSLTPSKHCTFINTATARILGSHNTPVLNINFILNQTLTRFTPAPAKSQGHTSDICSSFSEPKSWAFCLPALWSTTGGRDKCRGHGTHGGGSQTEAKYICDLLTPPNASVSSLPVRAPPTPTTDSTSQECPHRHWLLSPQEVLSFLLFPLDFESLYTAMVGSEKETGEGTPSVGKHAYERAHADGPPGLGEGINSPLPTCTGVRGLTQDIQDTGQESDTLSTLGSEDDEKTAKPQGDTSEVLPAVKNSPRTFQEDGDIPRLPLGAAKNSAQKPQRLGRSLCVWLAKSHRGDLDGPTFYFLRKGGAPAAPFAPGVQPTWISPFQSPCSLELSPAQPDFSHNYALSVHFTVPKQTFDSLKNDMEPSKAVPLNASKQDGPMPKPHSVSLNDTETRKLMEECKRLQGEMMKLSEENRHLR

SEQ ID NO: 10030 - protein, 124 aa, Homo sapiens
  misc_feature (1)...(124): Xaa = X or * as defined in Table 2
FMINPPNQVGRYRNIINLTTNISQKPLAPVILHGEIFKIFLTGIGVTQRYPLSPLPFKVFLAALDRKXREGAGEEVNGIENKRIKLSFVSDMIVYVENSKEKNGPLLELMRGLSKNATKLQKLI

SEQ ID NO: 10031 - protein, 131 aa, Homo sapiens
VARSLMLIPKTMGKMSPGHIRDLHSSPSHHRPRSPGGKSGFVGRAQGPCAMCSPGTWCSVSQLLQPWLKGANVQLGLWLHRVESPSLGSFHVVLSLWVHGSQELRFGNLHPDFRRACTVNLEKPQTLNASL

SEQ ID NO: 10032 - protein, 74 aa, Homo sapiens
QESLLLQFTKSSSCPSETTSARTLLSILLSAFWAKPFNKSLGSSKLSHIFLSSSDPSKAVPTSAYYPVPKSLPH

SEQ ID NO: 10033 - protein, 149 aa, Homo sapiens
MWESLELPRDLLNGFVQNADSNIDNKVQAEVVSDGDEELVGNWSKAAPAVAEMRQCKAQAMVSEGASLKPWQLPCGVEPENAQTSRIEVWEPLPRFQKMYGSAWMSRQRFTAGLGLLWRTSARAVWEGNMRSEPPHRVPTGAPPNGAVR

SEQ ID NO: 10034 - protein, 108 aa, Homo sapiens
  misc_feature (1)...(108): Xaa = X or * as defined in Table 2
SGFSLSLRGSISFSLCFKVGMCVTYPRCYCXSPVPXKPLIKPGWVSELPKPMNWASCSRTLASFLLQAARSHPWTPMKMETMEQSKLRSQPCKPAAGAVDPRAVVHGT

SEQ ID NO: 10035 - protein, 85 aa, Homo sapiens
VLTSVSLLPGHTAGLISQSLCRLVKNHCWGASGLVWRCSGPWGSLKERLQQGDMPQPFWNGPSEGSSPHFHPGPRTCASHLLQCF

SEQ ID NO: 10036 - protein, 178 aa, Homo sapiens
  DOMAIN (81)..(96): ENDOTHELIN RECEPTOR SIGNATURE domain identified by eMATRIX, accession number PR00366D, p-value=2.414e-09, raw score of 11.73
MWKRLWNQVTDTGWNSLEGSEEDRKMWESLELPRDLLNGFAQNADSNMDNKVQAEVVSDGDEKLVGNWSKGLLLLEEGMDPEAVGFQALPPDCRGPWTNPVGSVDNPRGLVNMKVPFVRPLHEDPNPLKIFMLSAAGNKSRWIPGSLCLHVTATPTTAELPGASRDGKVPAVCRVPAV

SEQ ID NO: 10037 - protein, 121 aa, Homo sapiens
  misc_feature (1)...(121): Xaa = X or * as defined in Table 2
LKCGKQWSDPITSPQTESQLLGSSQQQLHQQRHLQGPXKXNRDSPLCFSLSSCPIPKTYTNRHILLPSSSKSLCKFLXPAXISPQKMGFSFLSQSVCKFSKLLCSASLIKLKAFNSIQVTS

SEQ ID NO: 10038 - protein, 65 aa, Homo sapiens
PRHPCPPLLPLCLEHGPGGAPHRAQPSSTGGPTEPEQDDHSLPLNTALLLTRPQLVFLAATIHQC

SEQ ID NO: 10039 - protein, 70 aa, Homo sapiens
DSEEDRKMWESLELPRDLLNGFDQKPDSNMDNKIQAKVVSDGDEELVGNWSKGDSCYVLAKRTGGILPLP

SEQ ID NO: 10040 - protein, 67 aa, Homo sapiens
VPSWLRQVQKMPINIERALSRKSAAQIPTLGPPMKMETMGPSKVEKPTHASQSAGAVDPRARGPRVL

SEQ ID NO: 10041 - protein, 47 aa, Homo sapiens
  misc_feature (1)...(47): Xaa = X or * as defined in Table 2
QLQAMAIFEYLKKTFLRPGTVPHSCNPSTLGGRGGWITXGQELEASP

SEQ ID NO: 10042 - protein, 309 aa, Homo sapiens
  DOMAIN (102)..(141): MSP (Major sperm protein) domain proteins domain identified by eMATRIX, accession number PF00635B, p-value=8.269e-14, raw score of 15.84
  DOMAIN (78)..(172): MSP (Major sperm protein) domain identified by PFam, accession name MSP_domain, E-value=8.1e-14, PFam score of 59.3
  misc_feature (1)...(309): Xaa = X or * as defined in Table 2
SSAEPSPPSSPAPSQQTAAAGAPPLCAVSPMASASGAMAKHEQILVLDPPTDLKFKGDGXVFIRPEQYYTVXKWCKRSKRHGPFRPFTDVVTTNLKLRNPSDRKVCFKVKTTVPSRRYCVRPNSGIIDPGSTVTVSVMLQPFDYDPNERSKHKFMVQTIFAPPNTSDMEAVVWKEAKPDELMDSKLRCVFEMPNENDKLNDMEPSKAVPLNASKQDGPMPKPHSVSLNDTETRKLMEECKRLQGEMMKLSEENRHLRDEGLRLRKVAHSDKPGSTSTASFRDNVTSPLPSLLVVIAAIFIGFFLGKFIL

SEQ ID NO: 10043 - protein, 139 aa, Homo sapiens
  DOMAIN (3)..(139): STAT protein domain identified by PFam, accession name STAT, E-value=6.3e-49, PFam score of 158.2
FVAQQLQGDSLHFMQALYGQHFPIEVRHYLSQWIESQAWNTYDRCPMELVRCIRHILYNEQRLVREANNGSSPAGSLADAMSQKHLQINQTFEELRLVTQDTENELKKLQQTQEYFIIQYQESLRIQAQFGPLAQLSPQ

SEQ ID NO: 10044 - protein, 285 aa, Homo sapiens
  DOMAIN (144)..(167): PI3 KINASE P85 REGULATORY SUBUNIT SIGNATURE domain identified by eMATRIX, accession number PR00678H, p-value=5.615e-13, raw score of 9.13
  DOMAIN (33)..(133): STAT protein domain identified by PFam, accession name STAT, E-value=2.2e-70, PFam score of 227.1
MAIYPQILDSVSTPSKGILLRNLNAIVTLKKFSSDKGRVPFAVPDKVLWPQLCEALNMKFKAEVQSNRGLTKENLVFLAQKLFNNSSSHLEDYSGLSVSWSQFNRENLPGRNYTFWQWFDGVMEVLKKHLKPHWNDGAILGFVNKQQAHDLLINKPDGTFLLRFSDSEIGGITIAWKFDSRGAWERGLGSSGLLLNRNEGASAVLPESSMPSTILGTGSAHQPMGEATLLVQEGLALAGSSNSHSNLAVSECPQQWEEPPRARQGDSNRGKTTVELQVGYYHEST

SEQ ID NO: 10045 - protein, 270 aa, Homo sapiens
  DOMAIN (72)..(126): STAT protein domain identified by PFam, accession name STAT, E-value=3e-15, PFam score of 50.0
MLLWPLLLLLLLLPTLALLRQQRSQDARLSWLAGLQHRVAWGALVWAATWQRRRLEQSTLHVHQSQQQALRDSVDLDNPQENIKATQLLEGLVQELQKKAEHQVGEDGFLLKIKLGHYATQLQRIPCDDLPKNKLLPLSEHHALKLELPVNKQKMAGTGDRAKAVDGYVKPQIKQVVPEFVNASADAGGAAPRLSGVVMCLDSRCESPDSVLDTDGDFDLEDTMDVARRVEELLGRPMDSQWIPHAQSVTRDLSIVNFFIFTRRITLVDV

SEQ ID NO: 10046 - protein, 791 aa, Homo sapiens
  DOMAIN (601)..(624): PI3 KINASE P85 REGULATORY SUBUNIT SIGNATURE domain identified by eMATRIX, accession number PR00678H, p-value=1.318e-11, raw score of 9.13
  DOMAIN (2)..(596): STAT protein domain identified by PFam, accession name STAT, E-value=0, PFam score of 1113.0
  misc_feature (1)...(791): Xaa = X or * as defined in Table 2
TMAVWIQAQQLQGEALHQMQALYGQHFPIEVRHYLSQWIESQAWDSVDLDNPQENIKATQLLEGLVQELQKKAEHQVGEDGFLLKIKLGHYATQLQNTYDRCPMELVRCIRHILYNEQRLVREANNGSSPAGSLADAMSQKHLQINQTFEELRLVTQDTENELKKLQQTQEYFIIQYQESLRIQAQFGPLAQLSPQERLSRETALQQKQVSLEAWLQREAQTLQQYRVELPEKHQKTLQLLRKQQTIILDDELIQWKRRQQLAGNGGPPEGSLDVLQSWCEKLAEIIWQNRQQIRRAEHLCQQLPIPGPVEEMLAEVNATITDIISALVTSTFIIEKQPPQVLKTQTKFAATVRLLVGGKLNVHMNPPQVKATIISEQQAKSLLKNENTRNDYSGEILNNCCVMEYHQATGTLSAHFRNMSLKRIKRSDRRGAESVTEEKFTILFESQFSVGGNELVFQVKTLSLPVVVIVHGSQDNNATATVLWDNAFLQEPGRVPFAVPDKVLWPQLCEALNMKFKAEVQSNRGLTKENLVFLAQKLFNNSSSHLEDYSGLSVSWSQFNRENLPGRNYTFWQWFDGVMEVLKKHLKPHWNDGPILGFVTKQQAHDLLINKPDGTFLLRFSDSEIGGITIAWKFDSQERMFWNLMPFTTRDFSIRSLADRLGDLNYLIYVFPDRPKDVVYSKYYTPVPCESATAKSVLDGYVKPQIKQVVPEFVNASADAGGGSATYMDQAPSPAVCPPQAHYNMYPQNPDXVLDTDGDFDLEDTMDVARRVEELLGRPMDSQWIPHAQS

SEQ ID NO: 10047 - protein, 32 aa, Homo sapiens
  DOMAIN (10)..(32): 14-3-3 proteins domain identified by PFam, accession name 14- 3-3, E-value=3.6e-06, PFam score of 25.0
  misc_feature (1)...(32): Xaa = X or * as defined in Table 2
XPPTGMTMDKSELVQKAKLAEQAERYDDMAAA

SEQ ID NO: 10048 - protein, 605 aa, Homo sapiens
  DOMAIN (387)..(414): 14-3-3 proteins domain identified by eMATRIX, accession number BL00796A, p-value=4.656e-26, raw score of 10.52
  DOMAIN (387)..(466): 14-3-3 proteins domain identified by PFam, accession name 14- 3-3, E-value=5.9e-27, PFam score of 99.5
MTSRSPTLPSPLPYAAKQEMVVRGYCAGGAGFISSDKGGKADGSVGQGGGVAITGDGEAVSSGKKVSSEFTNSVSPALSGSSHTSPFQVAGSHSFPINALTLTVDTWLSLMLVRAIGACLFGYYPSWRMEGCAARRSGWASSGISRSRRCKETASAKLACQQWLQVAKRAGLGGGQSGRTVLRERVRIEIASTHIALAVECVSVRVWKVPRLPSRQKYAKHASQLVSNQKSEEEEYMKTFNISQQDLELVEVATEKITMLYEDNKHHVGAAIRTKTGEIISAVHIEAYIGRVTVCAEAIAIGSAVSNGQKDFDTIVAVRHPYSDEVDRSIRVIPTYGTDEWEQWWNAFNEENLFCSEEMPSSDDEATADSQHSTPPKKKRKGMTMDKSELVQKAKLAEQAERYDDMAAAMKAVTEQGHELSNEERNLLSVAYKNVKTERNEKKQQMGKEYREKIEAELQDICNDVLYSPPFPMDVASCEQTAVIVVSLLGSSCSASLPGSGLVLGVVCTESCDVNHLWVSQPAIPAPVSVAISEGAMDSVKVLSFGGLMFFVLIGLLPGGGAFQKASAVVVWRGIGGGQGPRTPLSSTTRVDRKGPPGGGGARSV

SEQ ID NO: 10049 - protein, 170 aa, Homo sapiens
  DOMAIN (15)..(40): 14-3-3 PROTEIN ZETA SIGNATURE domain identified by eMATRIX, accession number PR00305B, p-value=2.853e-10, raw score of 9.99
  DOMAIN (1)..(31): 14-3-3 proteins domain identified by PFam, accession name 14- 3-3, E-value=4.8e-05, PFam score of 21.0
KTERNEKKQQMGKEYREKIEAELQDICNDVLYSPPFPMDVASCEQTAVIVVSLLGSSCSASLPGSGLVLGVVCTESCDVNHLWVSQPAIPAPVSVAISEGAMDSVKVLSFGGLMFFVLIGLLPGGGAFQKASAVVVWRGIGGGQGPRTPLSSTTRVDRKGPPGGGGARSV

SEQ ID NO: 10050 - protein, 283 aa, Homo sapiens
  DOMAIN (230)..(266): 14-3-3 proteins domain identified by eMATRIX, accession number BL00796E, p-value=1.000e-40, raw score of 14.15
  DOMAIN (33)..(280): 14-3-3 proteins domain identified by PFam, accession name 14- 3-3, E-value=9.2e-94, PFam score of 324.9
  misc_feature (1)...(283): Xaa = X or * as defined in Table 2
VVGLGRKRSSRSGASLGRVFVPCSPPTGMTMDKSELVQKAKLAEQAERYDDMACSSERHVTEQGHERLQPKKRNLLSVAYKNVVGARRFLPGRVISSIEHENREGMKKKQQMGKEYPXEDRRQNLQDICKXCFWELLDKYLIPNAVTQPESXGVLLXKLKGGYFRYLSEVASXDNKQTTVSNSQPGFTREHFEISKKEMQPTHPIRLGLALNFSVFYYEILNSPEKACSLAKTAFDEAIAELDTLNEESYKDSTLIMQLLRDNLTLWTSENQGDEGDAGEGEN

SEQ ID NO: 10051 - protein, 320 aa, Homo sapiens
  DOMAIN (92)..(125): 14-3-3 proteins domain identified by eMATRIX, accession number BL00796B, p-value=7.000e-39, raw score of 10.67
  DOMAIN (60)..(320): 14-3-3 proteins domain identified by PFam, accession name 14- 3-3, E-value=3.3e-56, PFam score of 200.1
  misc_feature (1)...(320): Xaa = X or * as defined in Table 2
EGRGHLARSFARKGLCSLQPSHGRVSRDLGRYKKCILPIRLWIEKQEEHWTWSQGMTMDKSELVQKAKLAEQAERYDDMAAAMKAVTEQGHELSNEERNLLSVAYKNVVGARRSSWRVISSIEQKTERNEKKQQMGKEYREKIEAELQDICNDVFELLEQISLFPNATQPRKVKVFLLEKXKGDYFRYLFXKWQSXRQQTQPTCVETPQQSLPRKQFEISKKEMQPTHPIRLGLAPKFPQSFYYEIPKLPLKKAWXAWAKTALCFRHFDXSNLLNLDTLEWKSLIKDSTSDSWQLLRDNLTLWDIRKTRGDEGDAGEGEN

SEQ ID NO: 10052 - protein, 11 aa, Homo sapiens
  misc_feature (1)...(11): Xaa = X or * as defined in Table 2
MTVXLRTNGDF

SEQ ID NO: 10053 - protein, 153 aa, Homo sapiens
  DOMAIN (21)..(153): Glutathione S-transferases domain identified by PFam, accession name GST, E-value=4.2e-16, PFam score of 56.3
IEIHIKCGGIPAVLAAPAMGLELFLDLVSQPSRAVYIFAKKNGIPLELRTVDLVKGQHKSKEFLQINSLGKLPTLKDGDFILTESANRSVYLQGGCWHITEMRFSKCKAEGPAKSRSAILIYLSCKYQTPDHWYPSDLQARARVHEYLGWHAD

SEQ ID NO: 10054 - protein, 103 aa, Homo sapiens
  DOMAIN (5)..(86): Glutathione S-transferases domain identified by PFam, accession name GST, E-value=9.5e-06, PFam score of 22.3
HEQTPDHWYPSDLQARARVHEYLGWHADCIRGTFGIPLWVQVLGPLIGVQVPEEKVERNRTAMDQALQWLEDKFLGDRPFLAGQQPVALGYELFEGRPRLAAW

SEQ ID NO: 10055 - protein, 83 aa, Homo sapiens
EEGVVLGSWRWRARLEGSPSNAEKPPGPTGRWEQLGVNAWSQCPYSHCPFVPSSAILIYLSCKYQTPDHWYPSDLQARARVHE

SEQ ID NO: 10056 - protein, 144 aa, Homo sapiens
  misc_feature (1)...(144): Xaa = X or * as defined in Table 2
AQESRDCGDHDRATALQPGQQSEILLLQRLPPENAVDXVALEGSQPLXTLACLLSCKYQTPDHWYPSDLQARARVHEYLGWHADCIRGTFGIPLWVQVRRANLPFLSFPLAPVPSLQLHVKLCTDKTLSVLGSASILRCSIHTS

SEQ ID NO: 10057 - protein, 48 aa, Homo sapiens
  misc_feature (1)...(48): Xaa = X or * as defined in Table 2
XSAILIYLSCKYQTPDHWYPSDLQARARVHEYLGWHADCIRGTFGIPL

SEQ ID NO: 10058 - protein, 127 aa, Homo sapiens
  DOMAIN (20)..(75): Glutathione S-transferases domain identified by PFam, accession name GST, E-value=0.09, PFam score of 9.2
TALSAFTAIPAVLAAPAMGLELFLDLVSQPSRAVYIFAKKNGIPLELRTVDLVKGGPSPFPRVSTNPVHPQAPALLCPERLAARTAPSPPPAASATRECCGLSGLGGITASLNLSLPSEKEDNVTFC

SEQ ID NO: 10059 - protein, 421 aa, Homo sapiens
  DOMAIN (159)..(189): Glutathione S-transferases domain identified by eMATRIX, accession number PF00043, p-value=9.667e-14, raw score of 21.83
  DOMAIN (109)..(289): Glutathione S-transferases domain identified by PFam, accession name GST, E-value=2.4e-22, PFam score of 76.9
  misc_feature (1)...(421): Xaa = X or * as defined in Table 2
MPGLGFREKKGGSRTVIPASRGCGLPAPILCTKWELPLSGSSRCLAAAALQGTVWTAESSSLTPAFQSRGWGLIPYFPARRDPATAAAHTALSAFTAIPAVLAAPAMGLELFLDLVSQPSRAVYIFAKKNGIPLELRTVDLVKGQHKSKEFLQINSLGKLPTLKDGDFILTESLAILIYLSCKYQTADHWYPSDLQGFGARVHEVPWAWHADLHPVGTFWYYPWGVQGVWGHSLGVQVPEEKVGTQTRTAMDQALQWLEDKFLGDRPFLAGQQVTLADLMALEGSXCKPVALGYELFEGRPRLAAWRRRVEAFLGAELCQEAHTSIILSILEQAAKKTLPTPSPEAYQAMLLRNRPGSPEGSGMGAKEISNKDSFCYLLAPFYLSLLPQSLLSKLQCEALHRQRHSSVLWQVLLLLRCKHT

SEQ ID NO: 10060 - protein, 53 aa, Homo sapiens
  misc_feature (1)...(53): Xaa = X or * as defined in Table 2
NIYQLEXKXFKNGQVWLGAVVRACNPSTLGGRWIPWGQEFGTSLANMVKPRLY

SEQ ID NO: 10061 - protein, 43 aa, Homo sapiens
  misc_feature (1)...(43): Xaa = X or * as defined in Table 2
ARSFHSDAPQGHLECHWCPGVLELXGHRNPDTCPHLEQGISSK

SEQ ID NO: 10062 - protein, 47 aa, Homo sapiens
  misc_feature (1)...(47): Xaa = X or * as defined in Table 2
HFSYIHWFYTEKYKIKITHQDYLQKFIIYCTEEKHAYHXPNKILFIT

SEQ ID NO: 10063 - protein, 143 aa, Homo sapiens
  misc_feature (1)...(143): Xaa = X or * as defined in Table 2
WSLHRPRGPLLWHMPRVPPPLTGLXSSPHDSVGPQPWKSPPTTSFNSPDPPENVQNHPGKPVAKSPFVPQRNGHPPKRPTWGSSTCWGEVIRSGSPPPPTKPVWPTSCEFGSVLPPEDETVFPPHFPVSLILFAISFALVCGD

SEQ ID NO: 10064 - protein, 1201 aa, Homo sapiens
  DOMAIN (947)..(989): RNA polymerases beta chain proteins domain identified by eMATRIX, accession number BL01166G, p-value=1.000e-40, raw score of 18.10
  DOMAIN (118)..(1104): RNA polymerase beta subunit domain identified by PFam, accession name RNA_pol_B, E-value=0, PFam score of 1163.0
  misc_feature (1)...(1201): Xaa = X or * as defined in Table 2
FQELGAREPFGNMYDADEDMQYDEDDDEITPDLWQEACWIVISSYFDEKGLVRQQLDSFDEFIQMSVQRIVEDAPPIDLQAEAQHASGEVEEPPRYLLKFEQIYLSKPTHWERDGAPSPMMPNEARLRNLTYSAPLYVDITKTVIKEGEEQLQTQHQKTFIGKIPIMLRSTYCLLNGLTRRDLCELNECPSDPGRYFIINGSEKVLIAQRKMATNTSFCRLQKTDSKYAYTGECRSCLENSSRPTSTIWVSMLARGGQGAKKSAIGQRIVATLPYIKQEVPIIIVFRALGFVSDRDILEHIIYDFEDPEMMEMVKPSLDEAFVIQEQNVALNFIGSRGAKPGVTKEKRIKYAKEVLQKEMLPHVGVSDFCETKKAYFLGYMVHRLLLAALGRRELDDRDHYGNKRLDLAGPLLAFLFRGMFKNLLKEVRIYAQKFIDRGKDFNLELAIKTRIISDGLKYSLATGNWGDQKKAHQARAGVSQVLNRLTFASTLSHLRRLNSPIGRDGKLAKPRQLHNTLWGMVCPAETPEGHAVGLVKNLALMAYISVGSQPSPILEFLEEWSMENLEEISPAAIADATKIFVNGCWVGIHKDPEQLMNTLRKLRRQMDIIVSEVSMIRDIREREIRIYTDAGRICRPLLIVEKQKLLLKKRHIDQLKEREYNNYSWQDLVASGVVEYIDTLEEETVMLAMTPDDLQEKEVAYCSTYTHCEIHPSMILGVCASIIPFPDHNQSPRNTYQSAMGKQAMGVYITNFHVRMDTLAHVLYYPQKPLVTTRSMEYLRFKELPAGINSIVAIASYTGYNQEDSVIMNRSAVDRGFFRSVFYRSYKEQESKKGFDQEEVFEKPTREPCQGMRHAIYDKLDDDGLIAPRGFVVSGDDVIIGKTVTLPENEDELWESTNRRYTKRDCSTFLRTSETGIVDQVMVTLNQEGYKFCKIRVRSVRIPQIGDKFASRHGQKGTCGIQYRQEDMPFTCEGITPDIIINPHAIPSRMTIGHLIECLQGKVSGLTRGEIGDATPFXWMLFNVAGRFPNLFILDYGLSSSGGKWRSLYNGFTGRKFTSQIFIGPTYYQRLKHMVDDKIHSRARGPIQIRQXTSPMEGSSPDGGLRFXEMDRDCQIAHGAAQFLRERLFEGHPEPHIQVPCFANLCGIMAIAQHPGPHTYECRGCPQXNPRFSLVRMPTACTLLFQELMSMSIAPRMMSV

SEQ ID NO: 10065 - protein, 43 aa, Homo sapiens
MGNLLKVLTCTDLEQGPNFFLDFENAQPTESEKEIYNQVNVAL

SEQ ID NO: 10066 - protein, 345 aa, Homo sapiens
  DOMAIN (175)..(187): OLFACTORY RECEPTOR SIGNATURE domain identified by eMATRIX, accession number PR00245D, p-value=5.224e-09, raw score of 10.47
  misc_feature (1)...(345): Xaa = X or * as defined in Table 2
AGAKFFPXFXKVADAQPTESEKEIYNQVNVVLKDAEGILEDLQSYRGAGHEIREAIQHPADEKVAKKKAWGAVVPLVGKLKKFYEFSQRLEAALRGLLGALTSTPYSPTQHLEREQALAKQFAEILHFTLRFDELKMTNPAIQNDFSYYRRTLSRMRINNYPAEGENEVANELANRMSLFYAEATPMLKTLSDATTKFVSENKNLPIENTTDCLSTMASVCRVMAGNTEYRSQILQNEETVSFLSWRAMVGCSXYSYDHRTSSGEAFCLKLPKFDMKGCIKVLKDQPPNSVEGLLKSLRYTTKHLEWMRLPPSKLKSMLPITILGIKHPAVDRRQYSAMTENAVF

SEQ ID NO: 10067 - protein, 134 aa, Homo sapiens
  misc_feature (1)...(134): Xaa = X or * as defined in Table 2
AVKMCDFTXDQTAXFKEAFQLFDRTGDGKILYSQCGDPKSDEMNVKVLDFEHFLPMLQTVAKNKDQGTYXDYVEGLRVFDKEGNGTVMGAEIRHVLVTLGEKMTEEEVQMLVAGHEDSNGCINYEELVRMVLNG

SEQ ID NO: 10068 - protein, 113 aa, Homo sapiens
DFTEDQTAEFKEAFQLFDRTEMNVKVLDFEHFLPMLQTVAKNKDQGTYEDYVEGLRVFDKEGNGTVMGAEIRHVLVTLGEKMTEEEVEMLVAGHEDSNGCINYEELVRMVLNG

SEQ ID NO: 10069 - protein, 106 aa, Homo sapiens
AVKMCDFTEDQTAEMNVKVLDFEHFLPMLQTVAKNKDQGTYEDYVEGLRVFDKEGNGTVMGAEIRHVLVTLGEKMTEEEVEMLVAGHEDSNGCINYEAFVRHILSG

SEQ ID NO: 10070 - protein, 100 aa, Homo sapiens
LKFRPRRRRTFLPLLCSCCLGLGGGLTAAGRGARGMENWSDSRWLLCKLTPGLVAVGMFPLMLPLQSGSPLALGVPLHSPVPWLIPPFLSTELVRMVLNG

SEQ ID NO: 10071 - protein, 333 aa, Homo sapiens
  DOMAIN (84)..(137): Tryptophan synthase alpha chain proteins domain identified by eMATRIX, accession number BL00167A, p-value=1.000e-40, raw score of 24.96
  DOMAIN (82)..(246): Tryptophan synthase alpha chain domain identified by PFam, accession name trp_syntA, E-value=8.9e-100, PFam score of 344.9
MLYCFSSGNVSKSPTANNARTGRADYVSITDDEALEAFKTLCLHEGIIPALESSHALAHALKMMRENPDKEQLLLKERKEGAFVPFVTLGDPGIEQSLKIIDTLIEAGADALELGIPFSDPLADGPTIQNATLRAFAAGVTPAQCFEMLALIRQKHPTIPIGLLMYANLVFNKGIDEFYAQCEKVGVKTVLVADVPVEESAPFRQAALRHNVAPIFICPPNADDDLLRQIASYGRGYTYLMSRAGTVAKNKDQGTYEDYVEGLRVFDKEGNGTVMGAEIRHVLVTLGEKMTEEEVEMLVAGHEDSNGCINYEVLIHTGPAHSRDRLRSSVRLD

SEQ ID NO: 10072 - protein, 237 aa, Homo sapiens
  misc_feature (1)...(237): Xaa = X or * as defined in Table 2
ARYKIHTGKGTDSGETGKVLSHSAPCGRCSRPWARHPDRSMPHKRFIVDTNQLLSSCPATSISTSSSVNVLPRCDFPEDQTAEFKEAFQLFDRTGDGKILYSQCGDVMRALGQNPTHAEVLKVLGNPKSDEMNVKVLDFEHFLPMLQTVAKNQDPGSPMGFMSKELRVFYKEGNGTVMGAEIRHVLVTPGXKLTEEEVEMLVAGHEDSNGCINYEAFVRHTPVGVTGPWAGASSAWC

SEQ ID NO: 10073 - protein, 161 aa, Homo sapiens
  misc_feature (1)...(161): Xaa = X or * as defined in Table 2
AVKMCDFTEDQTAEFKEAFQLFDRKPGDGKIPCTAQCGDVMRALGQNPLPNAEVLKAPGEPPRSDDMSVKEHDCEHFLHILQTVAQNQGQGTYEDYVEDFRVFDKEGNGTVMGAEIRHVLVTLGEEDXQRKKVEMLVAGPXRTANGLVSNYEELVRMVLNG

SEQ ID NO: 10074 - protein, 41 aa, Homo sapiens
MCHRAGPASLSAGQFIHIFLVTPMAAPRISAVCGPESRHQG

SEQ ID NO: 10075 - protein, 96 aa, Homo sapiens
APSNSLHGHSQPYFFTGIARQWAGAVGGWPEDAADSEHNLVPPPHLGGPPLLPLLALLAGSLGSPGTVALRQVPMQAHPLHHCPQHVCQCLPAYCH

SEQ ID NO: 10076 - protein, 109 aa, Homo sapiens
SWISDGTGRSAFIGIGFTDRGDAFDFNVSLQDHFKWVKQESEISQESQEMDARPKLDLGFKEGQTIKLCIGLCSKPGTTAIQLGPVLNGIGRTLRTDLRNKNDLEGTNL

SEQ ID NO: 10077 - protein, 160 aa, Homo sapiens
  misc_feature (1)...(160): Xaa = X or * as defined in Table 2
PLLCNPDPGWYWWVKQESEISKESQEMDARPKLDLGFKEGQTIKLCIGNITNKKGGASKPRTARGGGLSLLPPPPXGKVTIPPPSSVKLPSTNHVTPPSIPKSNHGGSDADILLDLDSPAPVTTPAPTPVSVSNDLWGDFSTASSSVPNQAPQPSNWVQF

SEQ ID NO: 10078 - protein, 44 aa, Homo sapiens
SKSRMSAEVIHQVEEALDTDEKEMLLFLCRDVAIDVVPPNVRDL

SEQ ID NO: 10079 - protein, 348 aa, Homo sapiens
  DOMAIN (7)..(60): Death effector domain proteins domain identified by eMATRIX, accession number PF01335A, p-value=1.284e-11, raw score of 25.98
  DOMAIN (1)..(80): Death effector domain identified by PFam, accession name DED, E-value=1.3e-33, PFam score of 125.1
MAEIGEDLDKSDVSSLIFLMKDYMGRGKISKEKSFLDLVVELEKLNLVAPDQLDLLEKCLKNIHRIDLKTKIQKYKQSVQGAGTSYRNVLQAAIQKSLKDPSNNFREEPVKKSIQESEAFLPQSIPEERYKMKSKPLGICLIIDCIGNETELLRDTFTSLGYEVQKFLHLSMHGISQILGQFACMPEHRDYDSFVCVLVSRGGSQSVYGVDQTHSGLPLHHIRRMFMGDSCPYLAGKPKMFFIQNYVVSDGQLEDSSLLEVDGPAMKNVEFKAQKRGLCTVHREADFFWSLCTADMSLLEQSHSSPSLYLQCLSQKLRQERGTIPGSGITESKDMHFSSLGCILLDVL

SEQ ID NO: 10080 - protein, 270 aa, Homo sapiens
  DOMAIN (103)..(156): Death effector domain proteins domain identified by eMATRIX, accession number PF01335A, p-value=1.284e-11, raw score of 25.98
  DOMAIN (1)..(176): Death effector domain identified by PFam, accession name DED, E-value=9.2e-70, PFam score of 245.2
MSAEVIHQVEEALDTDEKEMLLFLCRDVAIDVVPPNVRDLLDILRERGKLSVGDLAELLYRVRRFDLLKRILKMDRKAVETHLLRNPHLVSDYRVLMAEIGEDLDKSDVSSLIFLMKDYMGRGKISKEKSFLDLVVELEKLNLVAPDQLDLLEKCLKNIHRIDLKTKIQKYKQSVQGAGTSYRNVLQAAIQKSLKDPSNNFRSIPEERYKMKSKPLGICLIIDCIGNETELCGVRGPAGGQQPLGGGWASDEECGIQGSEARAVHSSPRS

SEQ ID NO: 10081 - protein, 250 aa, Homo sapiens
  DOMAIN (103)..(156): Death effector domain proteins domain identified by eMATRIX, accession number PF01335A, p-value=1.284e-11, raw score of 25.98
  DOMAIN (1)..(176): Death effector domain identified by PFam, accession name DED, E-value=4.9e-68, PFam score of 239.5
MSAEVIHQVEEALDTDEKEMLLFLCRDVAIDVVPPNVRDLLDILRERGKLSVGDLAELLYRVRRFDLLKRILKMDRKAVETHLLRNPHLVSDYRVLMAEIGEDLDKSDVSSLIFLMKDYMGRGKISKEKSFLDLVVELEKLNLVAPDQLDLLEKCLKNIHRIDLKTKIQKYKQSGGWNGTWMTKASFSLWLEIASLYILHIPDLPTPLPCIFMISAKCCQAVLNISVFKKESGICTGWQSYGHSGVLHVC

SEQ ID NO: 10082 - protein, 484 aa, Homo sapiens
  DOMAIN (107)..(160): Death effector domain proteins domain identified by eMATRIX, accession number PF01335A, p-value=1.284e-11, raw score of 25.98
  DOMAIN (5)..(180): Death effector domain identified by PFam, accession name DED, E-value=9.2e-70, PFam score of 245.2
SKSRMSAEVIHQVEEALDTDEKEMLLFLCRDVAIDVVPPNVRDLLDILRERGKLSVGDLAELLYRVRRFDLLKRILKMDRKAVETHLLRNPHLVSDYRVLMAEIGEDLDKSDVSSLIFLMKDYMGRGKISKEKSFLDLVVELEKLNLVAPDQLDLLEKCLKNIHRIDLKTKIQKYKQSVQGAGTSYRNVLQAAIQKSLKDPSNNFRLHNGRSKEQRLKEQLGAQQEPVKKSIQESEAFLPQSIPEERYKMKSKPLGICLIIDCIGNETELLRDTFTSLGYEVQKFLHLSMHGISQILGQFACMPEHRDYDSFVCVLVSRGGSQSVYGVDQTHSGLPLHHIRRMFMGDSCPYLAGKPKMFFIQNYVVSEGQLEDSSLLEVDGPAMKNVEFKAQKRGLCTVHREADFFWSLCTADMSLLEQSHSSPSLYLQCLSQKLRQERKRPLLDLHIELNGYMYDWNSRVSAKEKYYVWLQHTLRKKLILSYT

SEQ ID NO: 10083 - protein, 225 aa, Homo sapiens
  DOMAIN (107)..(160): Death effector domain proteins domain identified by eMATRIX, accession number PF01335A, p-value=1.284e-11, raw score of 25.98
  DOMAIN (5)..(180): Death effector domain identified by PFam, accession name DED, E-value=9.2e-70, PFam score of 245.2
SKSRMSAEVIHQVEEALDTDEKEMLLFLCRDVAIDVVPPNVRDLLDILRERGKLSVGDLAELLYRVRRFDLLKRILKMDRKAVETHLLRNPHLVSDYRVLMAEIGEDLDKSDVSSLIFLMKDYMGRGKISKEKSFLDLVVELEKLNLVAPDQLDLLEKCLKNIHRIDLKTKIQKYKQSVQGAGTSYRNVLQAAIQKSLKDPSNNFRMITPYAHCPDLKILGNCSM

SEQ ID NO: 10084 - protein, 449 aa, Homo sapiens
  DOMAIN (107)..(160): Death effector domain proteins domain identified by eMATRIX, accession number PF01335A, p-value=1.284e-11, raw score of 25.98
  DOMAIN (5)..(180): Death effector domain identified by PFam, accession name DED, E-value=9.2e-70, PFam score of 245.2
SKSRMSAEVIHQVEEALDTDEKEMLLFLCRDVAIDVVPPNVRDLLDILRERGKLSVGDLAELLYRVRRFDLLKRILKMDRKAVETHLLRNPHLVSDYRVLMAEIGEDLDKSDVSSLIFLMKDYMGRGKISKEKSFLDLVVELEKLNLVAPDQLDLLEKCLKNIHRIDLKTKIQKYKQSVQGAGTSYRNVLQAAIQKSLKDPSNNFRSIPEERYKMKSKPLGICLIIDCIGNETELLRDTFTSLGYEVQKFLHLSMHGISQILGQFACMPEHRDYDSFVCVLVSRGGSQSVYGVDQTHSGLPLHHIRRMFMGDSCPYLAGKPKMFFIQNYVVSEGQLEDSSLLEVDGPAMKNVEFKAQKRGLCTVHREADFFWSLCTADMSLLEQSHSSPSLYLQCLSQKLRQERKRPLLDLHIELNGYMYDWNSRVSAKEKYYVWLQHTLRKKLILSYT

SEQ ID NO: 10085 - protein, 70 aa, Homo sapiens
  misc_feature (1)...(70): Xaa = X or * as defined in Table 2
GSGVXDQPGQHGKPPSLLXLQNLAERGGGHLXSQLLRRLRQENHLNPGGRCCSELRSRHCTPAWATRAKL

SEQ ID NO: 10086 - protein, 283 aa, Homo sapiens
  DOMAIN (107)..(160): Death effector domain proteins domain identified by eMATRIX, accession number PF01335A, p-value=1.284e-11, raw score of 25.98
  DOMAIN (5)..(184): Death effector domain identified by PFam, accession name DED, E-value=2.6e-60, PFam score of 213.8
SKSRMSAEVIHQVEEALDTDEKEMLLFLCRDVAIDVTPPNVRDLLDNLRERGKLSVGDLAELLYRVRRFDLLKRILKMDRKAVETHLLRNPHLVSDYRVLMAEIGEDLDKSDVSSLIFLMKDYMGRGKISKEKSFLDLVVELEKLNLVAPDQLDLLEKCLKNIHRIDLKTKIQKYKQSVQGAGTSYRNVLQAAIQKSLKDPSNNFRLHNGRSKEQRLKEQLGAQQEPVKKSIQESEAFLPQSIPEERYKMKSKPLGNLPGLIDWHWALRTELSFEDTFTSLGY

SEQ ID NO: 10087 - protein, 227 aa, Homo sapiens
  DOMAIN (107)..(160): Death effector domain proteins domain identified by eMATRIX, accession number PF01335A, p-value=6.455e-10, raw score of 25.98
  DOMAIN (5)..(185): Death effector domain identified by PFam, accession name DED, E-value=2.4e-49, PFam score of 177.4
  misc_feature (1)...(227): Xaa = X or * as defined in Table 2
SKSRMSAEVIHQVEEALDTDEKEMLLFLCRDVAIDVVPPNVRDLLDILRERGKLSVGDLAELLYRVRRFDLLKRILKMDRKAVETPLFKDPPLVSDYGVLMAEIGEDLDKSDVSSLIFLMKDYMGRGKISKEKSFLDLVVELEKLNLVAPPDQLDLLEKCLKNIPQKXPXRQKSQKYKQSVQGAGTSYRNVLQAAIQKSLKDPSNNFRMITPYAHCPDLKILGNCSM

SEQ ID NO: 10088 - protein, 70 aa, Homo sapiens
  misc_feature (1)...(70): Xaa = X or * as defined in Table 2
EKPLXSYLSSFFHFLEMGSHSIPRLVCSGVIVAHCSLQLLGSSDVPTSASRXLGLTGSHTTIPSLGLFLN

SEQ ID NO: 10089 - protein, 119 aa, Homo sapiens
  misc_feature (1)...(119): Xaa = X or * as defined in Table 2
AQLVEFGEHSMAPPAHFRALLYHPGTATLVPHPASISQHSPSPWGNARGXPVXRQRHLTAPRSPPHPRFRHKPGKDPRENPSRWPEVPSLPQTHVVPGQAAWDTVNTTVCKNRSTKPQD

SEQ ID NO: 10090 - protein, 122 aa, Homo sapiens
  DOMAIN (19)..(68): Eukaryotic RNA polymerase II heptapeptide repeat proteins domain identified by eMATRIX, accession number BL00115Z, p-value= 7.287e-09, raw score of 3.12
GTLPNSSLCESNNGHPRQRGRGSCPSRYTGVPSSPRLSRIQSWIRHLHPPPSPTRPSYSSPQASASPVGLRGHPAQTWTTCSRSVPSPVRFSSGSDGEKRLGQSCPHGNDPGAACISRPPYA

SEQ ID NO: 10091 - protein, 3244 aa, Homo sapiens
  DOMAIN (2849)..(2903): Kinesin light chain repeat proteins domain identified by eMATRIX, accession number BL01160B, p-value=4.649e-10, raw score of 19.54
  misc_feature (1)...(3244): Xaa = X or * as defined in Table 2
FKLELHQESDMEFNNTTQEDVQERLAYAEQLVVELKDIIRQKDVQLQQKDEALQEERKAADNKIKKLKLHAKAKLTSLNKYIEEMKAQGGTVLPTEPQSEEQLSKHDKSSTEEEMEIEKIKHKLQEKEELISTLQAQLTQAQAEQPAQSSTEMEEFVMMKQQLQEKEEFISTLQAQLSQTQAEQAAQLSSMQQVVREKDARFETQVRLHEDELLQLVTQADVETEMQQKLRVLQRKLEEHEESLVGRAQVVDLLQQELTAAEQRNQILSQQLQQMEAEHNTLRNTVETEREESKILLEKMELEVAERKLSFHNLQEEMHHLLEQFEQAGQAQAELESRYSALEQKHKAEMEEKTSHILSLQKTGQELQSACDALKDQNSKLLQDKNEQAVQSAQTIQQLEDQLQQKSKEISQFLNRLPLQQHETASQTSFPDVYNEGTQAVTEENIASLQKRVVELENEKGALLLSSIELEELKAENEKLSSQITLLEAQNRTGEADREVSEISIVDIANKRSSSAEESGQDVLENTFSQKHKELSVLLLEMKEAQEEIAFLKLQLQGKRAEEADHEVLDQKEMKQMEGEGIAPIKMKVFLEDTGQDFPLMPNEESSLPAVEKEQASTEHQSRTSEEISLNDAGVELKSTKQDGDKSLSAVPDIGQCHQDELERLKSQILELELNFHKAQEIYEKNLDEKAKEISNLNQLIEEFKKNADNNSSAFTALSEERDQLLSQVKELSMVTELRAQVKQLEMNLAEAERQRRLDYESQTAHDNLLTEQIHSLSIEAKSKDVKIEVLQNELDDVQLQFSEQSTLIRSLQSQLQNKESEVLEGAERVRHISSKVEELSQALSQKELEITKMDQLLLEKKRDVETLQQTIEEKDQQVTEISFSMTEKMVQLNEEKFSLGVEIKTLKEQLNLLSRAEEAKKEQVEEDNEVSSGLKQNYDEMSPAGQISKEELQHEFDLLKKENEQRKRKLQAALINRKELLQRVSRLEEELANLKDESKKEIPLSETERGEVEEDKENKEYSEKCVTSKCQEIEIYLKQTISEKEVELQHIRKDLEEKLAAEEQFQALVKQMNQTLQDKTNQIDLLQAEISENQAIIQKLITSNTDASDGDSVALVKETVVISPPCTGSSEHWKPELEEKILALEKEKEQLQKKLQEALTSRKAILKKAQEKERHLREELKQQKDDYNRLQEQFDEQSKENENIGDQLRQLQIQVRESIDGKLPSTDQQESCSSTPGLEEPLFKATEQHHTQPVLESNLCPDWPSHSEDASALQGGTSVAQIKAQLKEIEAEKVELELKVSSTTSELTKKSEEVFQLQEQINKQGLEIESLKTVSHEAEVHAESLQQKLESSQLQIAGLEHLRELQPKLDELQKLISKKEEDVSYLSGQLSEKEAALTKIQTEIIEQEDLIKALHTQLEMQAKEHDERIKQLQVELCEMKQKPEEIGEESRAKQQIQRKLQAALISRKEALKENKSLQEELSLARGTIERLTKSLADVESQVSAQNKEKDTVLGRLALLQEERDKLITEMDRSLLENQSLSSSCESPKLALEGLTEDKEKLVKEIESLKSSKIAESTEWQEKHKELQKEYEILLQSYENVSNEAERIQHVVEAVRQEKQELYGKLRSTEANKKETEKQLQEAEQEMEEMKEKMRKFAKSKQQKILELEEENDRLRAEVHPAGDTAKECMETLLSSNASMKEELERVKMEYETLSKKFQSLMSEKDSLSEEVQDLKHQIEDNVSKQANLEATEKHDNQTNVTEEGTQSIPGETEEQDSLSMSTRPTCSESVPSAKSANPAVSKDFSSHDEINNYLQQIDQLKERIAGLEEEKQKNKEFSQTLENEKNTLLSQISTKDGELKMLQEEVTKMNLLNQQIQEELSRVTKLKETAEEEKDDLEERLMNQLAELNGSIGNYCQDVTDAQIKNELLESEMKNLKKCVSELEEEKQQLVKEKTKVESEIRKEYLEKIQGAQKEPGNKSHAKELQELLKEKQQEVKQLQKDCIRYQEKISALERTVKALEFVQTESQKDLEITKENLAQAVEHRQKGTSQNLASFKVLLDDTQSEAARVIADNLKLKKELQSNKESVKSQMKQKDEDLERRLEQAEEKHLKEKKNMQEKLDALRREKVLLEETIGEIQVTLNKKDKEVQQLQENLDSTVTQLAAFTKSMSSLQDDRDRVIDEAKKWERKFSDAIQSKEEEIRLKEDNCSVLKDQLRQMSIHMEELKINISRLEHDKQIWESKAQTEVQLQQKVCDTLQGENKELLSQLEETRHLYHSSQNELAKLESELKSLKDQLTDLSNSLEKCKEQKGNLEGIIRQQEADIQNSKFSYEQLETDLQASRELTSRLHEEINMKEQKIISLLSGKEEAIQVAIAELRQQHDKEIKELENLLSQEEEENIVLEEENKKAVDKTNQLMETLKTIKKENIQQKAQLDSFVKSMSSLQNDRDRIVGDYQQLEERHLSIILEKDQLIQEAAAENNKLKEEIRGLRSHMDDLNSENAKLDAELIQYREDLNQVITIKDSQQKQLLEVQLQQNKELENKYAKLEEKLKESEEANEDLRRSFNALQEEKQDLSKEIESLKVSISQLTRQVTALQEEGTLGLYHAQLKVKEEEVHRLSALFSSSQKRIAELEEELVCVQKEAAKKVGEIEDKLKKELKHLHHDAGIMRNETETAEERVAELARDLVEMEQKLLMVTKENKGLTAQIQSFGRSMSSLQNSRDHANEELDELKRKYDASLKELAQLKEQGLLNRERDALLSETAFSMNSTEENSLSHLEKLNSMLLSRDEQSLHLSSQLEDSYNQVQSFSKAMASLQNERDHLWNELEKFRKSEEGKQRSAAQPSTSPAEVQSLKKAMSSLQNDRDRLLKELKNLQQQYLQINQEITELHPLKAQLQEYQDKTKAFQIMQEELRQEKPSWQHELHQLRMEKSSWEIHERRMKEQYLMAISDKDQQLSHLHNLIRELRSSSSETEPLKVQYQRQASPETSASPDGSQNLVYETELLRTQLNGQLXRKFHQKELRIQQLNSNFSQLLEEKNTLSIQLCDTSQSLRENQQHYGDLLNHCAVLEKQVQELQAVSKEKGPLNIDVAPGAPQEKNGVHRKSDPEELREPQQSFSEAQQQLCTSRQEVNELRKLLEEERDQRVAAENALSVPEEQIRRLEHSEWHSSRTPIIGLVGNQGAATVIDLTSNSCRRTRSGVGWKRVLRSLCHSRDPECPLSSSHLTFXMIHVLLIMCYTGHL

SEQ ID NO: 10092 - protein, 102 aa, Homo sapiens
  misc_feature (1)...(102): Xaa = X or * as defined in Table 2
MKLKRGAGSCKKPGSSGWGPAVGEFHSVQNICARREYQRQDYMDAMAEKQKLDAEFQKRLEKNKIAAEEQTAKRRKKRQKLKEKKLLAKKMKLEQKKQEGPX

SEQ ID NO: 10093 - protein, 69 aa, Homo sapiens
GDLPWEINPPSSCSLLREKDPPTTSGPEIDQPKKHLTNFKSATPRGPGTLAQGSLTDSFPDLLGLVAED

SEQ ID NO: 10094 - protein, 173 aa, Homo sapiens
  DOMAIN (111)..(128): Zinc finger, CCHC class domain identified by PFam, accession name zf-CCHC, E-value=4.6e-05, PFam score of 30.3
MLLTQSLFGGLFTRTHMKFGAVTQIRGPPLGDKSPVLLLFALERQRRHVLSMDPKLRCWSRTGKAAFPWCLIIAEMPDYSPTFQRCQTTQGRLPWSFTLSSKSRFSGEGARACYKCQKSDHQAKECPQPGIPPKPCPICAGPHWKSDCSTHLAATPRAPGTLAQGSLTDSFLA

SEQ ID NO: 10095 - protein, 131 aa, Homo sapiens
GLGTFAYISQDVWKSLYVQAEVCCRGRVFLVCSCGSCWSKSSRCEPPYAVLSIQVEAAHMHEIWCRDSDRDLPWESSCSLLLEKDPPSGPQTDQPKKHLTNFKSDKGDTFYPWTQNSGAGHGLGRQPSLGV

SEQ ID NO: 10096 - protein, 213 aa, Homo sapiens
MWESLELNRYLLNDFDQKPDSDMDNKVQAEVVSDGDEELVGNRSKETKETRFIRGPKTPALVTDWEGSLPLVFNHCREACLGPSPLAASPAFLGQGQDLINLAFKVYNNRKKLQFLASTVRQTPATSPAHKNFQTPEPQRPGVPPEPPPTGACYKYQKSDHQAKECLQPRIPPKPCPICAGPHWKLDCSTHLAATPRAPGTLAQGSLTDSFSA

SEQ ID NO: 10097 - protein, 167 aa, Homo sapiens
  misc_feature (1)...(167): Xaa = X or * as defined in Table 2
GFLVLLTSRMKLRTLAKQRRHILSVDPKLRRRSRTGKAAFPWCLIIAGTPLIIHPRFKGVRPCRDACLGPSPLAASPAFLGEGQELATSARNLTTRPRNACSPGFLLSRVHLCGTPLEIXPPGQGMPAAQDSSXAVSICAGPHWKSDCSTHLAGTPRAPGILAQGSL

SEQ ID NO: 10098 - protein, 8 aa, Homo sapiens
MRMKFGLD

SEQ ID NO: 10099 - protein, 90 aa, Homo sapiens
  DOMAIN (26)..(43): Zinc finger, CCHC class domain identified by PFam, accession name zf-CCHC, E-value=0.00037, PFam score of 27.3
MSPAHKNFQTPEPQRPGIPPEPPPPGACYKCQKSGHQAKECLQPRIPPKPRPICAGPHWKLDCPTHLASTPRAPGTLAQGSLTASQIFLA

SEQ ID NO: 10100 - protein, 167 aa, Homo sapiens
TKETRFIRGPKTPALVTDWEGSLPLVFNHCREACLGPSPLAASPAFLGQGQDLINLAFKVYNNRKKLQFLASTVRQTPATSPAHKNFQTPEPQRPGVPPEPPPTGACYKYQKSDHQAKECLQPRIPPKPCPICAGPHWKLDCSTHLAATPRAPGTLAQGSLTDSFSA

SEQ ID NO: 10101 - protein, 352 aa, Homo sapiens
  DOMAIN (306)..(317): GUANYLIN PRECURSOR SIGNATURE domain identified by eMATRIX, accession number PR00774C, p-value=5.418e-09, raw score of 11.76
  DOMAIN (288)..(305): Zinc finger, CCHC class domain identified by PFam, accession name zf-CCHC, E-value=0.00037, PFam score of 27.3
MWKGPKGLDMYGKSSVSPKTSDILGRDTLLLALKVQTVVLQTACGEGHVAGNCGRPLETEGSLQLTATKKLRDSVLQPKSPEFCQQFTRAWNRTQVPDETEAPAGTYAAQSGDLPWEINPLSSCSLLHEKDPPTASGPQTDQPKEHLTNFKSGFRGVRPRRDACLGPSPLAASPAFLGKGQVPQPLLSVSLPLLRLSGGQETPNPFSFTLSGKSAFLEEQVPQPRISVPQSLISTPRPLISVAQSLISAPQPLISLCPNPLFPCPDLLSLHPNPLFPRPNPFPAFLEGACYKCQKSGHQAKECLQPGIPPKLRPICAGPHWKSDCPTHLAATPRAPGTLAQGSLTASQIFLA

SEQ ID NO: 10102 - protein, 494 aa, Homo sapiens
  DOMAIN (424)..(441): Zinc finger, CCHC class domain identified by PFam, accession name zf-CCHC, E-value=0.00025, PFam score of 27.8
CSEYEDSSPAPVPATDLSSTLSSSVPQPQDTGTSQQLHPLDPWHELLRAQELQGATNHKGYSHAEHEHAGLGVQGGNGALAFSNSGHRHAVPTISSGTGRRRTPSSSAFGLLNLHQWFVSGFQAFSDRLKAALSASLLLRFGDSDWLPSSSACKCLMLGLHFVIVGNICATLKEKYSSMLHLDVTMKKNGEKRTRLQKRKKGMPPHPAYEDLNIAAITLPANVVLHQPSGFRTSGQLDPVWWSLDTDAHEIWCQDPGLGSGDFPWEITPLSSYSLLHEKDPPTTSGPQTDQPKKHLTNFKSKTKETGFIHGPKTPAPVTDWEGSLPLVFNHCRDTSLIIHPCFKGVRPRRDACLGPSPLAASPAFLEKGQDLINLAFKVYNNRKKLQFLASTVRQTAATSPAHKNFQMPEPQRPGVPPEPPPTGACYMCRKSGHWAKECPQPGIPPKPRPICVGPHRKSDCSTYLAATPRAPGNLAQGSLTDSFPDLLGLAAED

SEQ ID NO: 10103 - protein, 159 aa, Homo sapiens
  misc_feature (1)...(159): Xaa = X or * as defined in Table 2
SGRLPWLAQPPPRCDHRGPRKSRRRSSSPRMRREEQKLKLERLMKNPDKAVPIPEKMSEWAPRPPPEFVRDVMGSSAGAGSGEFHVYRHLRRREYQRQDYMDAMAEKQKLDAEFQKRLEKNKIAAEEQTAKRRKKRPQSXXKKNLLAKKMKLEQKKQEG

SEQ ID NO: 10104 - protein, 56 aa, Homo sapiens
  misc_feature (1)...(56): Xaa = X or * as defined in Table 2
ACYKCWKSGHRVKECLQPRIPPKPCPICAGPHXRSDCSTHLAATPRAPGTLAQGSL

SEQ ID NO: 10105 - protein, 156 aa, Homo sapiens
  DOMAIN (94)..(111): Zinc finger, CCHC class domain identified by PFam, accession name zf-CCHC, E-value=0.0026, PFam score of 24.4
MSSQRLFLTIDLPKTQCAQEKLRVIRGCRDQAMEALQMTKPCFFKSTWSQNHVEKCVPHFSPPLYVALNHLMALKGSQKSPKNYNTVFTKIRNGACYKCQKSDHQAKECLQPRIPPKPCPICAGPHWKSDCSAHLAATPRAPGTLAQGSLTDSFWA

SEQ ID NO: 10106 - protein, 328 aa, Homo sapiens
  DOMAIN (266)..(283): Zinc finger, CCHC class domain identified by PFam, accession name zf-CCHC, E-value=0.0026, PFam score of 24.4
MSGAKGFTGGIPGAGGGVKEGGEPRVGILDTVAVAQDEGLHLGEKLDCPAELLREEERGLGKGWIDRCGFLVSLTSRMKPRTLAVSVTVLKDGVSGVCSFRCPDVSRASSFRWVHGLADFRSEAADLHKSRFSGLGSQVSRPSVHLQLLSVSVLCTAKVIEVVETKETCFIREPKTPAPVMDWEGSLPLVFNHCRDASLMIHSRFKGVRPRRDACLGPSPLAASPAFLGQGQVPLNPFSFTLSAHKNFQTPEPQQPGVPPEPPPPGACYKCQKSDHQAKECLQPRIPPKPCPICAGPHWKLDCSTHLAATPRAPGTLAQGSLTDSFSA

SEQ ID NO: 10107 - protein, 300 aa, Homo sapiens
  DOMAIN (230)..(247): Zinc finger, CCHC class domain identified by PFam, accession name zf-CCHC, E-value=0.038, PFam score of 17.3
MLTEGFLAFLGSSLTATSLSAVSIGESSWIQCHTSLWGCKGGQERAPGEVEEPWWAKAKAGITFGCHLAKQEMGQTPVAQTAPKDVSPQSTDDPYSQSGDLPREINPLSSCYLLHEKDPPTTSNPQTNQPKEHLTNFKSVRLIPNLSSFPPTCPHSPNPKRCFQSSFSTDPSDLSLHPKIAPPQVYNNREELQLLASSLRESLATSPAHKNFKMPKPQWPGVPSGLHPSGSCFTCWKSGHWAKECLWPGIPPKLYPIYEGLHWKSDCPTHLATTPRAPGTLAQDSLTDSFPDLLSLAAED

SEQ ID NO: 10108 - protein, 174 aa, Homo sapiens
  DOMAIN (104)..(121): Zinc finger, CCHC class domain identified by PFam, accession name zf-CCHC, E-value=0.057, PFam score of 16.2
MPILASWPHPPGPFLLLTLLLGLTGPPMWTMLKNNIAEKNDIHSRDSHASQSGMASYMLHHLEASAFSLQHLRCSSSGSMKAGVANCYPEGMVPIGSCSSKDSGSCFKCQKFCHWAKECLQPRIPPKLCPICVGLHWKSDCPTHQAATPRAPGTLAQGSLTDSFPDLLGLVTED

SEQ ID NO: 10109 - protein, 382 aa, Homo sapiens
  DOMAIN (250)..(273): TRANSFORMING PROTEIN P21 RAS SIGNATURE domain identified by eMATRIX, accession number PR00449E, p-value=4.971e-11, raw score of 13.50
  DOMAIN (312)..(329): Zinc finger, CCHC class domain identified by PFam, accession name zf-CCHC, E-value=4.2e-05, PFam score of 30.4
WAPTPSKAGKNAGRVFKDSDKLDANDRILKDQTQEWSGSATLPSDGKTRLFYTDYSGKHYGKQSLTTAQVNVSKSDDTLKINGVEDHKTIFDGDGKTYQNVQQFIDEGNYTSGDNHTLRDPHYVEDKGHKYLVFEANTGTENGYQGEESLFNKAYYGGGTNFFRKESQKLQQSAKKRDAELANGALGIIELNNDYTLKKVMKPLITSNTSLECDVPLPVSMCSHLGISRAARQVSTEEGLSLAQEYNCGFFETSAALRFCIDDAFHGLVREIRKKESMPSLMEKKLKRKDSLWKKLKGSLKKKGILLEPAAAACYKCPKSGHWAKECPQPGIPLKLRPIWAGPHRKSDCSTHLAATPRARGTLAQGSLTDSFPDRLGLAAED

SEQ ID NO: 10110 - protein, 166 aa, Homo sapiens
  misc_feature (1)...(166): Xaa = X or * as defined in Table 2
LEGASYGETKADVAEGKSQKKATEWRSQGQRRKGEETSQLKDCKRTNQLSVKRTNQLSVIWTNQQDVGSYANPLMAAEPAQAVKLGWRPSPKPHIGDKSVSFWLLWMGSVQQGQKIGPPSQGNACRPRNSSXSHVPCGGGPHWKLDCSTHLAATPRAPGTLAQGSL

SEQ ID NO: 10111 - protein, 200 aa, Homo sapiens
  DOMAIN (144)..(161): Zinc finger, CCHC class domain identified by PFam, accession name zf-CCHC, E-value=0.00014, PFam score of 28.6
  misc_feature (1)...(200): Xaa = X or * as defined in Table 2
GHSRPRNWSQWSPRFLWLEAHRRPSGSPDSAELRSQVSDCLGTSRHGTGALFLALGIYAASCYVARFIRVRPHRDAYSLQGRLSDHSPTFQGCQTTQGRLPWSFTLSGKSRFSGEGATTSPAHKNFQTPEPQWPGIPPEPPPTGACYTCRKSGHWAKECPQARIPPKPHPICVGPHXKSDCSTHLAATPRAPGTLAQGSL

SEQ ID NO: 10112 - protein, 223 aa, Homo sapiens
  DOMAIN (161)..(178): Zinc finger, CCHC class domain identified by PFam, accession name zf-CCHC, E-value=0.00016, PFam score of 28.4
MDTVGRRLRDSLGRTVDLGLTGNHGVVHPSLADSANKFEENTYCFGRTVETLLLRFGKTIMEEQLVLKRVANILINLYGMTAVLSRASRSIRIGLRNHDHEEGQGYLGLGVKVSDMAQPHILHFLPIQQGSPGQERRHDQRQMSHSGICPMPLSRRLDRPGACYKCQKSDHQAKECPQPRIPPKPCPICAGPHWKLDCSTHLAATPRAPGTLARGSLTDSFSA

SEQ ID NO: 10113 - protein, 254 aa, Homo sapiens
  DOMAIN (184)..(201): Zinc finger, CCHC class domain identified by PFam, accession name zf-CCHC, E-value=2.5e-05, PFam score of 31.1
MENKEAFVFQAHKEEIFEREKQMEQDLTRRVRELGRDANNRLSPAAKENEGTWLCWPFKNNRQRRHILSVDPKLRRQSRTGKAAFPWCLIIAGTPLLIIHPHFRGVRPRRDACLGPSPLAASPAFLKERQDLINLAFKVYNNRKTLQFLASTVRQTPATSPAHKNFQTPEPQRPGIPPEPPSPGACYKCQKSGHQAKECPQPRIPPEPCPIRAGPHWKSDSSTHLAATPRASGTLAQGSLTDSFPDLLGLAAED

SEQ ID NO: 10114 - protein, 148 aa, Homo sapiens
  misc_feature (1)...(148): Xaa = X or * as defined in Table 2
LYALRNQIKPPPHVTGGQXQKQERTKPAWRPPRPGPPPFIALIGFCFSSVPVAWVELRVEPPGGHWPLSPLGEVRGEWRRPLSGLASVGQWLVPRSPEGGGGGWAGSPQVSGGWPPSAHLRNPPLSLGDILPAPQHPALSPGGPKLCG

SEQ ID NO: 10115 - protein, 206 aa, Homo sapiens
  misc_feature (1)...(206): Xaa = X or * as defined in Table 2
GALHLIRKGSPLHGQAHKHVAQQGRGILSRVHRPTHVHTQGRKATRLGLCSAHGRAPHPSFLPLVPVCCSWHHCETPRPCPLLPCPPPSSGASTSRTASSPVLSLTDXPYLSETEEQVSPGLTHKASLEPRSDSDAKTSSHPRDWPHPMVDCAAALSWTQPLWMFCGSRLAFHDAPAPAHMRAIWASRAIPAARPGPHLGLAAASC

SEQ ID NO: 10116 - protein, 112 aa, Homo sapiens
  DOMAIN (56)..(105): kw TRANSCRIPTASE REVERSE II ORF2 domain identified by eMATRIX, accession number DM01354Z, p-value=1.350e-10, raw score of 9.06
  misc_feature (1)...(112): Xaa = X or * as defined in Table 2
VCSETGFILYCRNDCKWDAPILETVWFFVRSXTLDMNCTPAIPFLFIYPLEMYGHAYXMTCTRIFMAALFIIATNQKSPKCSINSIHATKYYIAMKLIQLYPYVATWINKVF

SEQ ID NO: 10117 - protein, 173 aa, Homo sapiens
  DOMAIN (103)..(120): Zinc finger, CCHC class domain identified by PFam, accession name zf-CCHC, E-value=0.00016, PFam score of 28.4
MLKDLPRAIRQEKETKGSGDLPWEINPPSSYTLLCEKDPPTTSGPQTNQPKKHLTNFKSETKETRFIRGPKTPAPVTDWEGSLPLVLNHCRDASLIIHPCFKGACYKCQKSDHQAKDCRQPRIPPKPRPICVGPHCKSDCSTHLAATPRAPGTLAQGSLTDSFPDLLGLAAED

SEQ ID NO: 10118 - protein, 37 aa, Homo sapiens
LITAVSALAATPRAPGTLAQGSLTDSFPDLLGLAAED

SEQ ID NO: 10119 - protein, 310 aa, Homo sapiens
MEEKEERKRRRKRKRRREEGRDGERKRMEKQKENQDPKDPPTTSGPQTDQPKKHLTNFKSETKETRFIRGPKTPAPVTDWEGSLPLVFNHSRDTSLIIHPGFRGVRPRRDACLGPSPLAASPTFLGKGPAAPRQTELGPNSSSASAPPPYNPFIASPPHTWSGLQFPSMTSPPPPAQQFTLKKVAGAKGIVKDLINLTFKVYNNRKKLQFLASTVRQTPATSPAHKNFQTPELQQPGVPPEPPPRGACYKFQKSGHRAKECLQPRIPPKPHPICVGPHWKSDCPTHLAATPRAPGTLAQGSLTPSQIFLA

SEQ ID NO: 10120 - protein, 38 aa, Homo sapiens
LQNLSFAGLAATPRAPGTLAQGSLTDSFPDLLGLAAED

SEQ ID NO: 10121 - protein, 145 aa, Homo sapiens
  DOMAIN (82)..(99): Zinc finger, CCHC class domain identified by PFam, accession name zf-CCHC, E-value=0.0026, PFam score of 24.4
TSRSITTSPKESDSPAGPARQYYTKGNLVRICLGAVILIILAGFLAEDWHSRRKRLRHRGRAVQRPLPPLPPLPQTRKSHGGACYKCQKSDHQAKECLQPRIPPKPCPICAGPHWKSDCSTHLAATPRAPGTLAQGSLTPSRLSG

SEQ ID NO: 10122 - protein, 119 aa, Homo sapiens
  DOMAIN (57)..(74): Zinc finger, CCHC class domain identified by PFam, accession name zf-CCHC, E-value=0.029, PFam score of 18.0
MTSGPQTDQPKKHLTNFKSGVRPRRDACLGPSPLAASPAFLREGQVPLNPFSFTLSGACYKCPKSDHQAEECLQPRIPPKPCPICAGPHWKSDCSTHLAATPRAPGTLAQGSLTDSFSA

SEQ ID NO: 10123 - protein, 255 aa, Homo sapiens
  DOMAIN (185)..(202): Zinc finger, CCHC class domain identified by PFam, accession name zf-CCHC, E-value=0.00035, PFam score of 27.3
MVVSQNLVLSDVQICLEFLLPVGSWVLLTSGVKLQTFTVSVTALKGGLSRVVHSSWLLLIRSSQLGFRLFFIKYENPAQFMAHLVATLKRFTALDLEGSEGLFSLCILLPNLLPTLNKAQKLDSGPQTPQQDLINLAFKVYNNREELQLLASAVRETPATSPAHKNFKTPKPQWSGLPSGPPPPGSCFKCQKSGHWAKECLQPRIPPKPCPICVGPHWKWDCPTHLAATPRVPGTLAQGSLTDSFPNLLSLAAED

SEQ ID NO: 10124 - protein, 323 aa, Homo sapiens
  DOMAIN (162)..(259): Immunoglobulin domain identified by PFam, accession name ig, E-value=3.2e-07, PFam score of 28.3
SVAFVFACPAVDYLVKISWELQGDEEQDGLRNMIWQTLQKTKDYEEDVRIQNAINIAQGASEAIGQRQSSAAKPRRSGKESVREPWARVPGALGVAARKYQKMKGIEIKRRERLKCGAKIERRKRLKDREVGEESKKRPLTGFEIEPPKVTVMPKNQSFTGGSEVSIMCSATGYPKPKIAWTVNDMFIVGSHRYRMTSDGTLFIKNAAPKDAGIYGCLAKAPKLMVVQSELLVALGDITVMECKTSGIPPPQVKWFKGDLELRPSTCFLLSILAPPLQSLPSLNFNSFHFLDFLAATPRAPGTLAQGSLTDSFPDLLGLAAED

SEQ ID NO: 10125 - protein, 85 aa, Homo sapiens
  misc_feature (1)...(85): Xaa = X or * as defined in Table 2
RPRSERLLWGTSPLSCALTLXGDPPTTSGPQTNQLKEHLTNFKSGPHWKMDCPTHPAATPRAPGTLAQGSLTDSFPDLLGSAAED

SEQ ID NO: 10126 - protein, 144 aa, Homo sapiens
MTSGPQTDQPKKHLTNFKSETKETHFIRGPKTPAPVTDWEGSLPLVFNHWRDASLIIHPRFKGVRPRRDACLGPSPLAASPAFLGKGQELATSARNLTTKARNACSPGFLLSRIPSVRDPTGNRTVQLTWQPLPEPLELWPKAL

SEQ ID NO: 10127 - protein, 175 aa, Homo sapiens
  misc_feature (1)...(175): Xaa = X or * as defined in Table 2
DRVLSLLPRLECSGSILAHCNVCLPGFKRFSCLSLPSSWDYRHTPPCPVXLVFLVEMGFRHFSQAKSRTLTGDPPASASQKCWNYRRDNLAWLASALNKVINLLKSEIPSFFLVQLSGFSRTLLLQGFLNFNYHTLVYSNNLPIMQTFTQDFGRISGKPFPGIMILCNREILYIM

SEQ ID NO: 10128 - protein, 254 aa, Homo sapiens
  DOMAIN (185)..(202): Zinc finger, CCHC class domain identified by PFam, accession name zf-CCHC, E-value=6.7e-05, PFam score of 29.7
  misc_feature (1)...(254): Xaa = X or * as defined in Table 2
WQVPLSWGRGKYPSTPSPSPLAASPTFLGQGQVPLNPFSFTLSGKSRFPGAGASTPQPLLLHPQRQVPLSWGRGKYPSTPSPSPSAASPAFLGQGQVPLNPFSFTLSSKSRFPRGQETPNRLFPHPNLLSLHPNPLFPHPDLLSLCPNPLFPCLNPFSAFLEGKNPPPLLRVSTLFSGLASFTMGACYTCQKSGHWAKECPQPGIPPKPCPISVGPHXKSDCSTHLAATPGAPGTLAQGLTDSFPDLLGLAAED

SEQ ID NO: 10129 - protein, 208 aa, Homo sapiens
MEFCISLGRKITFSNIFPYNGANWKVFLKKSQPLLNALVEQDDAERLFRRFRAAGDLPYGAFGEIFWETQCQEMQQLADRVIACRQPGQSMEIDLACNGVQITGWLPQLWDAEGISFSVFSFGMLKGSASVSSALGCWSLLHMLEICHWAKECPQHGIPPKPRPICVGPHRKSDCSSHLAATPRAPGTLAQGSLTDSFPDLLGLAAED

SEQ ID NO: 10130 - protein, 63 aa, Homo sapiens
LRSGDLPWEINALSSCSLLHEKDPPTTSGSQTDQPKKHLTNFKSETKETRFICGPKTPAPVTD

SEQ ID NO: 10131 - protein, 81 aa, Homo sapiens
  DOMAIN (11)..(28): Zinc finger, CCHC class domain identified by PFam, accession name zf-CCHC, E-value=0.00014, PFam score of 28.6
  misc_feature (1)...(81): Xaa = X or * as defined in Table 2
KGGWSQRHSQGACYTCRKSGHWAKECPQPGIPPKPRPICVGPHXKSDCSTHLAANPRAPGTLAQGSLTDSFPDLLGLAAED

SEQ ID NO: 10132 - protein, 12 aa, Homo sapiens
MAINSIRSLQLM

SEQ ID NO: 10133 - protein, 59 aa, Homo sapiens
VAYPPKKVCPEKGPWPFVSHIHFGPNLYPQKKPWGEKGRKLNCPVKGPWTTRGQRMPPA

SEQ ID NO: 10134 - protein, 608 aa, Homo sapiens
  DOMAIN (347)..(356): Zinc finger C3HC4 type (RING finger), proteins. domain identified by eMATRIX, accession number BL00518, p-value=9.143e-10, raw score of 12.23
  DOMAIN (254)..(399): IBR domain identified by PFam, accession name IBR, E-value= 0.00013, PFam score of 26.9
  misc_feature (1)...(608): Xaa = X or * as defined in Table 2
FWGEGEKATAFLICNLAGCLRCPVDMNSQGSDSNEEDYDPNCEEKEEEEEDDPGDIEDYYVGVASDVEQQGADAFDPEEYQFTCLTYKESEGALNEHMTSLSFLSLKVSHSSWLNLYLVNFHWQVSEILDRYKSNSAQLLVEARVQPNPSQKHVPTSHPPHHCAGCGMQVCAKRENLLSLWACQLXFCRSCWEQHCSVLVKDGVGVGVSCMAQDCPLRNTSGTFVFPLLPNEEFEERKYRRYLFRDYVESHYQLQLCPGADCPMVIRVQEPRARARVQCNRCNEVFCFKCRQMYHAPTDCATIRKWLTKLQDDSETANYISAHTKDCPKCNICIEKDGGCNHMQCSKCKHDFCWMCLGDWKTHGSEYYECSRYKENPDIVNQSQQAQARREALKKYLFYFERWENHNKSLQLEAQTYQRIHEKIQERVMNNLGTWIDWQYLQNAAKFFGQGSFSSLLLQCRYTLQYTYPYAYYMESGPRKKLFEYQQAQLEAEIENLSWKVERADSYDRGDLENPDAIITEPTGGTNPCLKDFHDTLSWDVDVPGVRKISLARSPRAAHTACLAGSAFHDPQATAQGPTPERHWQHLLVDFCFLLFSLFVSTQGRRPC

SEQ ID NO: 10135 - protein, 219 aa, Homo sapiens
  DOMAIN (125)..(212): Domain of unknown function UPF0099 domain identified by PFam, accession name UPF0099, E-value=7.5e-05, PFam score of 11.9
  misc_feature (1)...(219): Xaa = X or * as defined in Table 2
GPCCIPIIQQLILFQCFKHFSGPLCFQLCKLMMPSKSLVMEYLAHPSTLGLAVGVACGMCLGWSLRVCFGMLPKSKTSKTHTDTESEASILGRQPGSPGXFLVVRNXLXRWGKGERGCPSASHAAVSSPTKQISKKKSPEMAQNNGEYWWASPKVGGSKVPDEETLIALLAHAKMLGLTVSLIQDAGRTQIAPGSQTVLGIGPGPADLIDKVTGHLKLY

SEQ ID NO: 10136 - protein, 126 aa, Homo sapiens
GGLWPQRAVASGSGKWRQEPSLHFAMSFLIDSSIMITSQIRQYVVQVIFSVTFAFSCTMFELIIFEILGVLNSSSRYFHWKMNLCVILLILVFMVPFYIGYFIVSNIRLLHKQRLLFSCLLWLTFM

SEQ ID NO: 10137 - protein, 28 aa, Homo sapiens
NKPSGFWGMIKSVTTSASGSESILCPSA

SEQ ID NO: 10138 - protein, 84 aa, Homo sapiens
  misc_feature (1)...(84): Xaa = X or * as defined in Table 2
ETRCRGHPPRDREPPPSXPGIQSSPGVPPSRPSNKAYPRLPIRPQPPGLSFRSTPPRPSPKPPCPPHIGRHVQPTKTSAVSILS

SEQ ID NO: 10139 - protein, 307 aa, Homo sapiens
MAKEEPLAYICQDICWIPGVAYILNFLFHSQQHYFRATFPTSDAGRTRVSFNLHVPIGPHCGNDISQLSNGHLEQEYDLYMEDSVDPYHLHRKEVDALEELSRQLFLETADLYATKGTVVINVANDMTAMLIGKGGVILYTQRGFCPQAIFMSISFENGKLKAARGTYFSSSQYLLMMLEVFKAVKEEIQFRRVEKIVESFELERATKHRVLYVFCLRESTERELLELRTKVSKQEWLLQSTAEHLKIANQQKESMEQFIVSQRSPKLLRKSSKLIKDAFHNELMGDENIKNYAYKLEMSLTGNNIK

SEQ ID NO: 10140 - protein, 734 aa, Homo sapiens
  DOMAIN (195)..(206): PDZ domain proteins (Also known as DHR or GLGF) domain identified by eMATRIX, accession number PF00595, p-value=9.400e-09, raw score of 13.40
  DOMAIN (155)..(360): PDZ domain (Also known as DHR or GLGF) domain identified by PFam, accession name PDZ, E-value=4e-18, PFam score of 73.6
MGGASARPAAPSGRWGVPLPGRPFWEVMSPSARPPPRLGGVPNSSLRTGHDDDGGFVEQRRGKGDSEGQLGLRIKLVRVVFSWQLVMAFDKAELPSSPKVLVLTTVTRATGGVGLQTLRRLQERPGIGQLGALCLICTVRLCGHEEMTSTFNPRECKLSKQEGQNYGFFLRIEKDTEGHLVRVVEKCSPAEKAGLQDGDRVLRINGVFVDKEEHMQVVDLVRKSGNSVTLLVLDGDSYEKAVKTRVDLKELGQSQKEQGLSDNILSPVMNGGVQTWTQPRLCYLVKEGGSYGFSLKTVQGKKGVYMTDITPQGVAMRAGVLADDHLIEVNGENVEDASHEEVVEKVREGPRRVGYGFDRQQMAAALQKRGLTVKNKQTESNNNINKKRPHKNPIQRSAASKIEELEKNYFKIQYGSKKEPVQVKTTVSKKNKAGGITLPDFKLYYKVTVTKTACSRYFHWKMNLCVILLILVFPMVPFLQLAYFIVSNIRLLHKQRLLFSCLLWLTFMYFFWKLGDPFPILSPKHGILSIEQLISRVGVIGVTLMALLSGFGAVNCPYTYMSYFLRNVTDTDILALERRLLQTMDMIISKKKRLRGPGVVGFLLIYSPVGQIAEDLTLIQQEVDALEELSRQLFLETADLYATKERIEYSKTFKGKYFNFLGYFFSIYCVWKIFMVKFWSQHISFILVGIIIVTSIRGLLITLTKFFYAISSSKSSNVIVLLLAQIMGMYFVSS

SEQ ID NO: 10141 - protein, 71 aa, Homo sapiens
QKMGMYFVSSVLLIRMSMPLEYRTIITEVLGELQFNFYHRWFDVIFLVSALSSILFLYLAHKQAPEKQMAP

SEQ ID NO: 10142 - protein, 513 aa, Homo sapiens
  misc_feature (1)...(513): Xaa = X or * as defined in Table 2
GGLWPQRAVASGSGKWRQEPSLHFAMSFLIDSSIMITSQILFFGFGWLFFMRQLFKDYEIRQYVVQVIFSVTFAFSCTMFELIIFEILGVLNSSSRYFHWKMNLCVILLILVFMVPFYIGYFIVSNIRLLLSPLSQVAXTTDWLFSCLLGLTFMYFFGKLGDPFPILSPKHGILSIEQLISRVGVIGVTLMALLSGFGAVNCPYTYMSYFLRNVTDTDILALERRLLQTMDMIISKKKRMAMARRTMFQKGEVHNKPSGFWGMIKSVTTSASGSENLTLIQQEVDALEELSRQLFLETADLYATKERIEYSKTFKGKYFNFLGYFFSIYCVWKIFMATINIVFDRVGKTDPVTRGIEITVNYLGIQFDVKFWSQHISFILVGIIIVTSIRGLLITLTKFFYAISSSKSSNVIVLLLAQIMGMYFVSSVLLIRMSMPLEYRTIITEVLGEELQFNFYIHRWFDVIFLVRRFSLGILFPLFGLHKQAPEKQMAPLNLKPYLQTDKRPSGFQKFRI

SEQ ID NO: 10143 - protein, 52 aa, Homo sapiens
AERHQFRDFRDLNKDGHLYGSEVGHWVLPPAQDQPLVEANHLLHESDTDKVQ

SEQ ID NO: 10144 - protein, 354 aa, Homo sapiens
  DOMAIN (238)..(251): EF-hand calcium-binding domain proteins domain identified by eMATRIX, accession number BL00018, p-value=9.100e-10, raw score of 7.41
  misc_feature (1)...(354): Xaa = X or * as defined in Table 2
AAELGTFAGTQSGAWRAERSWHNRGPMMWRPSVLLLLLLLRHGAQGKPSPDAGPHGTGRVHQAAPLSDAPHDDAHGNFQYDHEAFLXREVAKEFDQLTPQESQARLGRIVDRMDRAGDGDGWVSLAELRAWIAHTHQRHILDSVSAAWDTYDTDRDGRVGWEELRNATYGHYAPGEEFHDVEDAETYKKMLARDERRFRVADQDGDSMATREELTAFLHPEEFPHMRDIVIAETLEDLDRNKDGYVQVEEYIADLYSAEPGEEEPAWVQTERQQFRDFRDLNKDGHLDGSEVGHWVLPPAQDQPLVEANHLLHESDTDKDGRLTKAEILGNWNMFVGSQATNYGEDLTRHHDEL

SEQ ID NO: 10145 - protein, 286 aa, Homo sapiens
RRGPCNGRYHHPVYPHPTAVQREPPAGPRACHSPCWHDAPAVRSPGQSTSPHDAVTWPFLHGSREGPTPRRTRTPPAFRPHTQACPSTCYCHTLASRRGPCNGRYHHPVYPHPTAVQREPPAGPRACHSPCWHDAPADLRGADQRPERLADSAWIWSSQRLATWKRVQRTGQNTWASESLSFEALANLPANMMQLPGHFSTFLVRAPHPAAEKPLLHSILTHRPVHPLATVTLLPAEEAPVMADITAQSILTPQLCSGTLLLAHVAARAHAGTTLQHVGVCGPHYR

SEQ ID NO: 10146 - protein, 559 aa, Homo sapiens
  DOMAIN (35)..(74): PROTEIN ZINC FINGER ZINC-FINGER METAL-BINDING NU domain identified by eMATRIX, accession number PD01066, p-value=8.114e-09, raw score of 19.43
  DOMAIN (34)..(103): KRAB box domain identified by PFam, accession name KRAB, E- value=5e-05, PFam score of 22.8
  misc_feature (1)...(559): Xaa = X or * as defined in Table 2
FGTLGSAFPESCPFQKEDGMIKFQIQGIHVQERVTFKDVAVVFTKVXLALLDKAQINLYQDVMLENFMNLMLWIPLPVSFQLGSANGESQQEIQGRDKSEVRIFIPPGFSLEVAVEWLYSISIDQRDAHPKTDPKLRPEEAQRKSLSRNVKMHCFVKPRAAPQTEPTLEPTLFPSYPGVRPVPWRMRKEAYGLQSPESPARSSGHSQGYPGEDLHRAEQRPERFAGSAWTWSLQRLATWKRIQRTGQNTWLEALANLLANMTQLPGHFSTFLVSAPHPAAEKPLLHSILTHRPVHLLATVTLLPAEEAPLMADITAQAILTPQLCSGTLLLAHVAARAHADTNLQHVGIPAGDTTGDMASMTLLPGSDTVDLKDTAPCIVAAPVPAMAKKGQGIAQAIASEGANPRPWQLPRTVGPVVNGEGKCGVGAPRVPTEALPSGAVRRGPPSSRPQTHQQLPPCAWKRCRHSTPAHENSQVGYTLQSHRGRDAQGLGSSSLASACLDVRHGVKGDYFRTLRFNDCPAGFQTGMGPAAPLFCLISPFQNGGIYPKAVAPLYLGSN

SEQ ID NO: 10147 - protein, 173 aa, Homo sapiens
  misc_feature (1)...(173): Xaa = X or * as defined in Table 2
SLRTVPPHYLQGSPGTPIPPSSLGPASGTRRVESCVAAPNEQEGSSKGGARPVTICDSQNRPCCPPPPSPALPQADPSLKTWLLLNHIRWDTDSMICMEDSSXXGFKPNKDSIKVQVRLRGVQGVGHCMGGAALPSTSLSSCLTPFPAPLNSRHTTLAPPLPQPENPAQRTTP

SEQ ID NO: 10148 - protein, 131 aa, Homo sapiens
KCHDCGAILEEYDEETLGLAIVVLSTFIHLSPDLAAPLLLDIMQSVGRLASSTTFSNQAESMMVPGNAAGVAKQFLRCIFHQLAPNGIFPQLFQSTIKDGTFLRTLASSLMDFNELSSIAALSQLLEGLNN

SEQ ID NO: 10149 - protein, 173 aa, Homo sapiens
  DOMAIN (108)..(143): Prion protein domain identified by eMATRIX, accession number BL00291A, p-value=9.069e-09, raw score of 4.49
  misc_feature (1)...(173): Xaa = X or * as defined in Table 2
FPLFLFLLLLLAFPVALTTTRRIQGVPQTLVLQAKRVNTSRPHPDGSQPPTSASFNQLNPTTNSTPQLRSHVASGYVGXKQMQYPHPPQHAPAPPQPCPWQVDTFLPAPTRPLLGSGPGSPSRRSPGGPPPAGKGPAPGPECPPTAQRPTTRQYLGPLFKGDPRNSPREKPRS

SEQ ID NO: 10150 - protein, 344 aa, Homo sapiens
  misc_feature (1)...(344): Xaa = X or * as defined in Table 2
GLLEPFSKLLSFVIQNAVFTLAYLVELCGLCYRAFTKERDKFYLSRSGCSKSFCRRLKLKSPLPDTNLLLLVQFILPDAGTKLDXVNNPEQADDSLCTWDVGTAAMECVRQYINEVLDFMADMHTLTKLKSHMKTCSQASDEDTFGGHLKVGLAQIAAMDISRGNHRDNKAVIRYLPWLYHPPSAMQQGPKEFIECVSHIRLLSWLLLGSLTHNAVCPNASSPCLPIPLDAGSHVADHLIVILIGFPEQSKTSVLHMCSLFHAFIFAQLWTVYCEQSAVATNLQNQNEFSFTAILTALEFWSRVTPAILQLMGHINKVMGRKWVLLSMWISLMGGNLPGNAIWT

SEQ ID NO: 10151 - protein, 569 aa, Homo sapiens
  misc_feature (1)...(569): Xaa = X or * as defined in Table 2
EVPPNPACYQHQAXSVCLCLHLKSSLTSSRRXCTDKCHDCGAILEEYDEETLGLAIVVLSTFIHLSPDLAAPLLLDIMQSVGRLASSTTFSNQAESWPPTASSRSCSKARSKVIHPLRIQAPQICLIPDTQTLNPIVDFPDGTFLRTLASSLMDFNELSSIAALSQLLEGLNNKKNLPAGGAMIRCLENIATFMEALPMDSPSSLWTTISNQFQTFFAKLPCVLPLKSLLEPFSKLLSFVIQNAVFTLAYLVELCGLCYRAFTKERDKFYLSRSVVLELLQALKLKSPLPDTNLLLLVQYENKMNEKAERLVLKLLNSAQQQFQFICADAGTKLAESTILSKQMIASVPGCGTAAMECVRQYINEVLDFMADMHTLTKLKTSVLHMCSLFHAFIFAQLWTVYCEQSAVATNLQNQNEFSFTAILTALEFWSRVTPSILQLMAHNKVLIPMWLPMIQSNIKHLSAGLQLRLQAIQNHVNHHSLRTLPGSGQSSAGLAALRKWLQCTQFKMAQVENPVLGKQPLNFILYEWTPSAPQCQHSGLAIMGLKTNNLDPQAGWGNHIGYLYNPLS

SEQ ID NO: 10152 - protein, 351 aa, Homo sapiens
  DOMAIN (54)..(94): UBA domain identified by PFam, accession name UBA, E-value=3e -13, PFam score of 57.5
  misc_feature (1)...(351): Xaa = X or * as defined in Table 2
FFSSVFPAAIEPGERASARRRVSRAGCLALTLPALLLVTHQVPAEAAVSRAMAELTALESLIEMGFPRGRAEKALALTGNQGIEAAMDWLMEHEDDPDVDEPLETPLGHILGREPTFSEQGGPLKDLVLAAGEGKPALSXEEERQEQTKRMFGAWLAQKGSREREEREGREALERERQRRRQGQELSAARQRLQEDKMRRAAAEERRREKAEELAARQRVREKIERDKAERAKKYGGSVGSQPPQVAPEPGPVPSSPSQEPPTKGEDDKCRIQVRLPRWDPHXPQTFRAREQLAAVRLYVELHRGEELGGGARDPVQIASVAFPRRAFLRSLTMERPLQELGMAAKTRNQD

SEQ ID NO: 10153 - protein, 187 aa, Homo sapiens
  misc_feature (1)...(187): Xaa = X or * as defined in Table 2
IHFQQEHWPSQLLLRESLEDMMLHSALGLCLLLVTVSSNLAIAIKKEKRPPQPLSRGWGDDITGVQTYEEGSLLCSKKXGSHXWVIHHLGDCQYSQALKKVFAQNEEIQEMAQNKFIMLNLMHETTDKNLSPDGQYVPRIMFVDPSLTVRADIAGRYSNRLYTYEPRDLPLLIENMKKALRLIQSEL

SEQ ID NO: 10154 - protein, 63 aa, Homo sapiens
PLPARGKSTLPATFCSPPAPELASMSVVPPNRSQTGWPRGVTQFGNKYIQQTKPLTLERTINL

SEQ ID NO: 10155 - protein, 275 aa, Homo sapiens
  misc_feature (1)...(275): Xaa = X or * as defined in Table 2
PLEGIADNRFPHGETSTLPATFCSPSAPELASMSVVPPNRSQTGWPRGVTQFGNKYIQQTKPLTLERTINLYPLTNYTFGTKRAPLTRRTSSVAARFQRIEGKNFDKIGMRRTVEGVLIVHEHRLTPWCYLLQLGTNFLPNYLGWLNLTPGEDEVEGLKTAXXPEIPGSVQDGVLQDWGPLTDCHWVTWWRPKFLNPPSVSHIFPAHITKPKEHIRKLFPGSSLQEKALVLQFPKKFTSWXPATPLFELYDNAPGYGPIISSLPQLLSRFNFIYN

SEQ ID NO: 10156 - protein, 269 aa, Homo sapiens
  DOMAIN (142)..(160): DNAJ PROTEIN FAMILY SIGNATURE domain identified by eMATRIX, accession number PR00625H, p-value=9.813e-09, raw score of 16.44
  misc_feature (1)...(269): Xaa = X or * as defined in Table 2
RARIPKMAAVKDSCGXGEMATGNGRRLHLGIPEAVFVYYFSYXRKMYHYFMKQPGNETADTVLKKLDEQYQKYKFMELNLAQKKRRLKGQIPEIKQTLEILKYMQKKKESTNFNGRPRFFAGRLTLYLQKLSVPPTRXRGCLGLGANVMLEYDIDEAQALLGKDLSTATKILDSRGGRTLTFLRDQFTTTEVNMARGLLIGDVKKEGNKDDSTKNKALMLGQFKNVGLVFPNMFIFKYPFIPYRFDINFGMFNQPRNFKEKINTILFIY

SEQ ID NO: 10157 - protein, 155 aa, Homo sapiens
  DOMAIN (32)..(73): Ribosomal protein L18e proteins domain identified by eMATRIX, accession number BL01106A, p-value=1.000e-40, raw score of 18.93
  DOMAIN (11)..(155): Eukaryotic ribosomal protein L18 domain identified by PFam, accession name Ribosomal_L18e, E-value=2.2e-86, PFam score of 300.4
ERIMEWHRHTMTECSAQEPKSHDIYLRLLVKLYRFLARRTNSTFNQVVLKRLFMSRTNRPPLSLSRMIRKMKLPGRENKTAVVVGTITDDVRVQEVPKLKVCALRVTSRARSRILRAGGKILTFDQLALDSPYVRSKGRKFERARCRRARRGYKN

SEQ ID NO: 10158 - protein, 231 aa, Homo sapiens
  DOMAIN (31)..(72): Ribosomal protein L18e proteins domain identified by eMATRIX, accession number BL01106A, p-value=1.000e-40, raw score of 18.93
  DOMAIN (10)..(231): Eukaryotic ribosomal protein L18 domain identified by PFam, accession name Ribosomal_L18e, E-value=7.7e-123, PFam score of 421.5
MGVDIRHNKDRKVRRKEPKSQDIYLRLLVKLYRFLARRTNSTFNQVVLKRLFMSRTNRPPLSLSRMIRKMKLPGRENKTAVVVGTITDDVRVQEVPKLKHNTRDVVVKVPEVLRTAAVSPGVLRVVNDSVGYQGSAAPRQWRVCALRVTSRARSRILRAGGKILTFDQLALDSPKGCGTVLLSGPRKGREVYRHFGKAPGTPHSHTKPYVRSKGRKFERARGRRASRGYKN

SEQ ID NO: 10159 - protein, 213 aa, Homo sapiens
  DOMAIN (11)..(209): Eukaryotic ribosomal protein L18 domain identified by PFam, accession name Ribosomal_L18e, E-value=1.3e-33, PFam score of 125.0
  misc_feature (1)...(213): Xaa = X or * as defined in Table 2
VDHPPYKRTEKVRAQRSPKSQYIYLSLLLKLYRFSGPEEPNSNIQTRVVLKRLFMSPHQTGPPLSLSRMIRKMKLSWPGKQRRAVVCVGPITDDVRGSRRYPKLKVCCTAPXPSRAPQAAILKAGGKILTFDQLALGLPLKGCGTVLLSGPSKGRKVYRHFRQRPQEPPHKPHQNPTFRSKGRKFERARGRRASRGYKKLTLDPTLLYKKIFA

SEQ ID NO: 10160 - protein, 158 aa, Homo sapiens
  misc_feature (1)...(158): Xaa = X or * as defined in Table 2
NPSLRCWLGLSPGKLAGARGRGTVHVGGPEGPCTHSTSTKRMAKRHPEVSTGGGGKAPXSQGIRGQGAGQGGARSGVAGNGGGGARSRLRLSPAAASATASGPEGSGPGSGGRSRVPVEAAPPCPRSDVVPAARGAAAAGPGGTWLPASQVGPSGPWG

SEQ ID NO: 10161 - protein, 30 aa, Homo sapiens
ENASMGPCLFKTTSVSHLVEVVPQKLSWVI

SEQ ID NO: 10162 - protein, 639 aa, Homo sapiens
  DOMAIN (626)..(638): C-terminal cystine knot proteins domain identified by eMATRIX, accession number BL01185A, p-value=1.170e-09, raw score of 8.11
  misc_feature (1)...(639): Xaa = X or * as defined in Table 2
MWFAYSPFTFCHDWKLPEASAEAKRMPALCFLYSLQHPLCEDGVCAHEAGVWGIGGLIIAYVKGYEEVSQKFTSIRRVRGDNYCALRATLFQAMSQAVGLPPWLQDPELMLVVFVAILLHSHLECREPLLIPILSLYMGALVRCTTLCLGYYKNIHDIIPDRSGPELGGDATIRKMLSFWWPLALILATQRISRPIVNLFVSRDLGGSSAATEAVAILTATYPVGHMPYGWLTEIRAVYPAFDKNNPSNKLVSTSNTVTAAHIKKFTFVCMALSLTLKDSVQKPDISLTGRLVQTLPTRMRHQRGESKDVAPLASWLSEPSTSSEASQTSSKLTINSQGEGKAKQKLECGTLSIVLRSCEKNQERIKAAEKRNRSWTTLCGLGAWRPLLFELPVIVQTPDQTNRFQFRYPAKTQSGLCSFFHSFDLLTLEAFVKVWFPGCLLILLCFVMFWTPNVSEKILIDIIGVDFAFAELCVVPLRIFSFFPVPVTVRAHLTGWLQGPGAHAGCFCSHFASQSPGMPGAPAHPDPLLVHGRTCALHHPVPGLLQEHSRHHPXQKWPGAGGRCNNKKDAELLVAFGSNSGHTENQSAYCQPLCFPGPWWQFCSHRGSGDFDSHIPCGSHAIRLVDGNPCCVSCFRQE

SEQ ID NO: 10163 - protein, 228 aa, Homo sapiens
  misc_feature (1)...(228): Xaa = X or * as defined in Table 2
RGKKNTVLKKIRSQFTIRESFDLRYKEHIPLPKLEFPLDTKVFGLLGEDMVCTGPTGVALKGPHWKYIGIIDEGKDLVNFSYQKLVFRTSWSTWLPRGPRVLLRDCSLKTPKPAAQAQEPTVHLRPRRQGFSGSMRSLIDWVSLTHSDGDVIVPIVLSNERYHWPVLGWVGGVDCDEFFRVVLGEARLHLDGVAHQHXGKKEPFPTCSKTTSVSHLVEVVPQKLSWVI

SEQ ID NO: 10164 - protein, 171 aa, Homo sapiens
  misc_feature (1)...(171): Xaa = X or * as defined in Table 2
RESIDQGFSNFFFFLRRSLDSVTQAGVQWHDLSSLQPPPPGFKXKXFSCLSLLSSXDYRSPATMPGLIFLYFFFLVETGGFTVLARMVSISXPQCDPPASASQSAGIQKNSFFFLETRVSAFVAQAGVQWCDLGSPQPPPPGVQPFSCLSLPSSWDYRRTPPGPANFAVCN

SEQ ID NO: 10165 - protein, 54 aa, Homo sapiens
CRHRQAQLLQMVVHPRRLGGWWRIFARQEHICCIRVPKVNKFYLLQCVHIHFHG

SEQ ID NO: 10166 - protein, 40 aa, Homo sapiens
MAGQFRIYLWDPLLILSQIVLMQTVYYGSLGLWLALVDGL

SEQ ID NO: 10167 - protein, 36 aa, Homo sapiens
YAQLGTRVPELASVTHFTPPLPINKCQPVSCSNLGS

SEQ ID NO: 10168 - protein, 179 aa, Homo sapiens
  misc_feature (1)...(179): Xaa = X or * as defined in Table 2
RPGHAQTLGSPSLALGMAGQFRSYVWDPLLILSQIVLMQTVYYGSLGLWLAVVDGLLRISPSLDQMFDAEILGFSTPFQGRLSMMSFILNTLNSALGLLYFIRRGKQCLDFTVTVHFFHLLGLLGSNSSPFSPSGGXTLVGLGPKPVVALHSLAVIGEYLCMRTELKEIPLNSAPKSNV

SEQ ID NO: 10169 - protein, 175 aa, Homo sapiens
MRRQDCPNPMKKIRSSSPVQQERVSSLYFQSARGGLGVDVSALGTVTHVSPSSSARVAMAMSAERGCSMGHIMGYRGVGRFTRGNGDHARVGYKGNPPEVSISGYDDNWYLGRTDATLSCDVRSNPEPTGYDWSTTSGTFPTSAVPRAPSWSSTQWTVCSIHLRLHITNAVDGPR

SEQ ID NO: 10170 - protein, 143 aa, Homo sapiens
  misc_feature (1)...(143): Xaa = X or * as defined in Table 2
AYLQSSMIAQSRATRTGLATWHQHKALDRHFPRLSSRHPLFETCSSPPCKRWGEKSHFRRACKEGRESAPCGIPRPRFKVHTPRGKLRMRPVPRRFGGSRLGPRSRRKRRTKQPRXPAAPRDSPGAPAAPPTPRPSAARNGGG

SEQ ID NO: 10171 - protein, 130 aa, Homo sapiens
  misc_feature (1)...(130): Xaa = X or * as defined in Table 2
GSSCRSRSLVVVLSIVLEGPAPAPGDPQTSPSALDKLKEFGNTLEDKARELISRIKQSELSAKMRVPLRPRHEALPVAPGPGGGSVDRLGRPSPSPRGPPDVSQCLGXAEGVWKHTGGQGSGTHQPHQTE

SEQ ID NO: 10172 - protein, 597 aa, Homo sapiens
  DOMAIN (279)..(297): Immunoglobulins and major histocompatibility complex proteins domain identified by eMATRIX, accession number BL00290B, p-value= 8.500e-09, raw score of 13.17
  DOMAIN (90)..(376): Immunoglobulin domain identified by PFam, accession name ig, E-value=1.7e-09, PFam score of 35.6
  misc_feature (1)...(597): Xaa = X or * as defined in Table 2
SAAGTGPEPEPEPHRHLLNRPADRPPQSGPRASGRAQSPPGPSMARAAALLPSRSPPTPLLWPLLLLLLLETGAQDVRVQVLPEVRGQLGGTVELPCHLLPPVPGLYISLVTWQRPDAPANHQNVAAFHPKMGPSFPSPKPGSERLSFVSAKQSTGQDTEAELQDATLALHGLTVEDEGNYTCEFATFPKGSVRGMTWLRVIAKPKNQAEAQKVTFSQDPTTVALCISKEGRPPARISWLSSLDWEAKETQVSGTLAGTVTVTSRFTLVPSGRADGVTVTCKVEHESFEEPALIPVTLSVRYPPEVSISGYDDNWYLGRTDATLSCDVRSNPEPTGYDWSTTSGTFPTSAVAQGSQLVIHAVDSLFNTTFVCTSQPNPWALARAEQVIFVRETPQALAPRCGPAGVGGRGGDTAGAAASGWGVLGLHPCMRVRRRRKSPGGAGGGASGDGGFYDPKASGVGKWGPRLLDTSSPWSHGTRWQGXGGGGGGREGRERPHVASTPSTSRMTWSPSWTAPSSHGGPVYVXPGPPWPGPLPSCRRDRRRRRCCGRCCCCCSWKPEPRMCEFKCYPRCEASSGAPWSCRATCCHLFLDCTSPW

SEQ ID NO: 10173 - protein, 538 aa, Homo sapiens
  DOMAIN (354)..(370): COMPONENT PHOSPHOTRANSFERASE SYST domain identified by eMATRIX, accession number PD02963B, p-value=4.774e-10, raw score of 5.41
  DOMAIN (47)..(333): Immunoglobulin domain identified by PFam, accession name ig, E-value=2.2e-12, PFam score of 44.9
  misc_feature (1)...(538): Xaa = X or * as defined in Table 2
MARAAALLPSRSPPTPLLWPLLLLLLLETGAQDVRVQVLPEVRGQLGGTVELPCHLLPPVPGLYISLVTWQRPDAPANHQNVAAFHPKMGPSFPSPKPGSERLSFVSAKQSTGQDTEAELQDATLALHGLTVEDEGNYTCEFATFPKGSVRGMTWLRVIAKPKNQAEAQKVTFSQDPTTVALCISKEGRPPARISWLSSLDWEAKETQVSGTLAGTVTVTSRFTLVPSGRADGVTVTCKVEHESFKEPALIPVTLSVRYPPEVAISGYDDNWDLGRTDATLSCDVRSNPEPTGYDWSTTSGTFPTSAVAQGSQLVIHAVDSLFNTTFVCTVTNAVGMGRAEQVICVRETPNTAGAGPTGGIIGGIIAAIIATAVAATGILICRQQRKEQTLQGAEEDEDLEGPPSYKPPTPKAKLEAQEMPSHLFTLGAXEHSPLKTPYFDAGASCTEQEMPRYHELPTLEERSGPLHPGATSLGSPIPVPPGPPAVEDVSLDLEDEEGEEEEEYLDTINPIYDALSYSSPSDSYQGKGFVMSRAMYV

SEQ ID NO: 10174 - protein, 764 aa, Homo sapiens
  DOMAIN (571)..(587): COMPONENT PHOSPHOTRANSFERASE SYST domain identified by eMATRIX, accession number PD02963B, p-value=2.306e-10, raw score of 5.41
  DOMAIN (81)..(274): Immunoglobulin domain identified by PFam, accession name ig, E-value=9.2e-08, PFam score of 30.1
  misc_feature (1)...(764): Xaa = X or * as defined in Table 2
DPSSGHWLHWSIRPPAAGWSPRSGRAAARAQSPRRREHGAPGRTGPGGGPRLLLLAVLLAAHPGAQDVRVQVLPEVRGQLGGTVELPCHLLPPVPGLYISLVTWQRPDAPANHQNVAAFHPKMGPSFPSPKPGSERLSFVSAKQSTGQDTEAELQDATLALHGLTVEDEGNYTCEFATFPKGSVRGMTWLRVIAKPKNQAEAQKVTFSQDPTTVALCISKEGRPPARISWLSSLDWEAKETQVSGTLAGTVTVTSRFTLVPSGRADGVTVTCKVEHESFEEPALIPVTLSVRYPPEVSISGYDDNWYLGRTDATLXACDVRSNPEPTGYDWSTTSGTFPTSAVAQGSQLVIHAVNSVLFNTTFVCTVTNAVGIGAGAEQVIFVRETPRASPRDVGPLVWGAVGGTLLVLLLLAGGSLAFILLRVRRRRKSPGGAGGGASGDGGFYDPKAQVLGNGDPVFWTPVVPGPMEPDGKDEEEEEEEEKAEKGLMLPPPPALEDDMESQLDGSLISRRAVYTPPSPVPGSAGAAAVACTDPVPSSGVHGHNDHKNSSSMFRMKALAQLSPYKTPNTAGAGATGGIIGGIIAAIIATAVAATGILICRQQRKEQTLQGAEEDEDLEGPPSYKPPTPKAKLEAQEMPSQLFTLGASEHSPLKTPYFDAGASCTEQVGAHGKTKEMPRYHELPTLEERSGPLHPGATSLGSPIPVPPGPPAVEDVSLDLEDEEGEEEEEYLDKINPIYDALSYSSPSDSYQGKGFVMSRAMYV

SEQ ID NO: 10175 - protein, 117 aa, Homo sapiens
  DOMAIN (77)..(111): Annexins repeat proteins domain proteins domain identified by eMATRIX, accession number BL00223A, p-value=5.500e-21, raw score of 15.59
  DOMAIN (2)..(117): Annexin domain identified by PFam, accession name annexin, E- value=6.4e-16, PFam score of 66.3
VGCDLRSRRGGAQPGLGTDEDAIISVLAYRNTAQRQEIRTAYKSTIGRDLIDDLKSELSGNFEQVIVGMMMPTVLYDVQELRRAMKGAGTDEGCLIEILASRTPEEIRRISQTYQQQ

SEQ ID NO: 10176 - protein, 39 aa, Homo sapiens
  DOMAIN (2)..(25): ANNEXIN FAMILY SIGNATURE domain identified by eMATRIX, accession number PR00196A, p-value=5.800e-17, raw score of 11.16
SHGHGTDEDAIISVLAYRNTAQRQEIRTAYKSTIGRDLI

SEQ ID NO: 10177 - protein, 129 aa, Homo sapiens
  DOMAIN (24)..(58): Annexins repeat proteins domain proteins domain identified by eMATRIX, accession number BL00223A, p-value=5.500e-32, raw score of 15.59
  DOMAIN (21)..(129): Annexin domain identified by PFam, accession name annexin, E- value=9.6e-17, PFam score of 69.1
PRVMAMATKGGTVKAASGFNAMEDAQTLRKAMKGLGTDEDAIISVLAYRNTAQRQEIRTAYKSTIGRDLIDDLKSELSGNFEQGAGTDEGCLIEILASRTPEEIRRISQTYQQQYGRSLEDDIRSDTSF

SEQ ID NO: 10178 - protein, 354 aa, Homo sapiens
  DOMAIN (24)..(58): Annexins repeat proteins domain proteins domain identified by eMATRIX, accession number BL00223A, p-value=3.000e-27, raw score of 15.59
  DOMAIN (21)..(259): Annexin domain identified by PFam, accession name annexin, E- value=5.4e-24, PFam score of 93.1
  misc_feature (1)...(354): Xaa = X or * as defined in Table 2
PRDMAMATIGGTVKAASGFNAMEDAHTLRKAMKGLGTDENAIISVLAYRNTAQRLEIRTAYKSTIGRDLIDDLKSELSGNFEQVIVGMKMPTXRDDVQELRRAMKGAGTDEGCLIEILASRTPEEIRRISQTYQQQYGRSLEDDIRSDTSFMFKRVLVSLSAGGRDEGNYLDDALVRQDAQDLYEAGEKKWGTDEVKFLTVLCSPEPKITLLHVFDEYQKDIHRRIIEPEVLNSETSGIFWKIALLGLIVKCMRNKSAYFAEKLYKSMKGLGTDDNTLIRVMVSSSQKMDMLDIPAHTSKRLLWKSPLYSFIKNRVATSGDYRKVLLVLCGREMIKIKIPGRDREGSSTLLNFF

SEQ ID NO: 10179 - protein, 1536 aa, Homo sapiens
  DOMAIN (1347)..(1396): Eukaryotic RNA polymerase II heptapeptide repeat proteins domain identified by eMATRIX, accession number BL00115Z, p-value= 2.125e-09, raw score of 3.12
MKQLLPASGLLPLSSSPLSPRQESPGVERAHEGCLSQNLQVQRATREGEIDRVAKSGGQERACASSETESEAGDIMDQQFEEMNNKLNSVTDPTGFLRMVRRNNLFNSQAEYCAQPWGLSGEQQGPQPRSLHPAPLARPDPIQSHPQKSKEIEGVSADSSNPDPLDEGNSRRSSRFNVEAVLCSSRGRPDSSMPDCCRNAALEARSCQSMTSLFSNTVSPTQDGTSSLPRRQSSFAKPPLRALYDLLIAPMEGGVVESTEPLGTSRAGFASGTALFWLGDNGKAASPPGVSVSSLENEDDNTQCNRLEQGYREAAVPDWTQDLALCLLPTLQSLKARTAPHLCVPSSCYKAWYTLAVSKVSGMGLMHSSGPVGRHRQLILVLEGELYLIPFALLKGSSSNEYLYERFGLLAVPSIRSLSVQSKSHLRKNPPTYSSSTSMAAVIGNPKLPSAVMDRWLWGPMPSAEEEAYMVSELLGCQPLVGSVATKERVMSALTQAECVHFATHISWKLSALVLTPSMDGNPASSKSSFGHPYTIPESLRVQDDASDGESISDCPPLQELLLTAADVLDLQLPVKLVVLGSSQESNSKVTADGVIALTRAFLAAGAQCVLVSLWPVPVAASKMFIHAFYSSLLNGLKASAALGEAMKVVQSSKAFSHPSNWAGFMLIGSDVKLNSPSSLIGQALTEILQHPERARDALRVLLHLVEKSLQRIQNGQRNAMYTSQQSVENKVGGIPGWQALLTAVGFRLDPPTSGLPAAVFFPTSDPGDRLQQCSSTLQSLLGLPNPALQALCKLITASETGEQLISRLHQVLVQLQAGEKEQDLASAPIQVSISVQLWRLPGCHEFLAALDMGKPQAQMLAEGPCRHSMKLHKEPYSAHVQDLESSRRKQMLIFFVPLGFDLCEVGQEEVILKTGKQANRRTVHFALQSLLSLFGPDRSGHSGHVGLGDFQALGTHPARLMFLRAKLATVGRANAGLEGGYGLQVEPTESAEDSTELPKRLSLDSSSSLESLASAQSVSNALPLGYQQPPFSPTGADSIASDAISVYSLSSIASSMSFVSKPEGGSEGGGPGGRQDHDRSKNAYLQRSTLPRSQLPPQTRPAGNKDEEEYEGFSIISNEPLATYQENRNTCFSPDHKQPQPGTAGGMRVSVSSKGSISTPNSPVKMTLIPSPNSPFQKVGKLASSDTGESDQSSTETDSTVKSQEESNPKLDPQELAQKILEETQSHLIAVERLQRSGGQVSKSNNPEDGVQAPSSTAVFRASETSAFSRPVLSHQKSQPSPVTVKPKPPARSSSLPKVSSGYSSPTTSEMSIKDSPSQHSGRPSPGCDSQTSQLDQPLFKLKYPSSPYSAHISKSPRNMSPSSGHQSPAGSAPSPALSYSSAGSARSSPADAPDIDKLKMAAIDEKVQAVHNLKMFWQSTPQHSTGPMKIFRGAPGTMTSKRDVLSLLNLSPRHNKKEEGVDKLELKELSLQQHDGAPPKAPPNGHWRTETTSLGSLPLPAGPPATAPARPLRLPSGNGYKFLSPGRFFPSSKC

SEQ ID NO: 10180 - protein, 155 aa, Homo sapiens
SPGVERAHEGCLSQNLQVQRATREGEIDRVAKSGGQERACASSETESEAGDIMDQQFEEMNNKLNSVTDPTGFLRMVRRNNLFNSQAEYCAQPWGLSGEQQGPQPRSLHPAPLARPDPIQSHPQKSKEIEGVSADSSNPDPLDEGNSRRSSRFNV

SEQ ID NO: 10181 - protein, 75 aa, Homo sapiens
  DOMAIN (25)..(67): Ribosomal protein L30e proteins domain identified by eMATRIX, accession number BL00709B, p-value=3.724e-15, raw score of 21.58
  misc_feature (1)...(75): Xaa = X or * as defined in Table 2
IRQKKAIFVIVAFKRRGLRKTDIYYYARGGXFVKNKYRGFIIELGTTCGKYFLFCTLAIIDPSDSNIIISMPEQT

SEQ ID NO: 10182 - protein, 28 aa, Homo sapiens
GSSSNEYLYERFGLLAVPSIRSLSVQSK

SEQ ID NO: 10183 - protein, 514 aa, Homo sapiens
  DOMAIN (45)..(66): PROTEIN REPEAT DOMAIN TPR NUCLEA domain identified by eMATRIX, accession number PD00126A, p-value=4.115e-10, raw score of 22.53
  DOMAIN (38)..(311): TPR Domain domain identified by PFam, accession name TPR, E- value=1.9e-33, PFam score of 124.5
MGITKMNMNVMEEAIGYFEQQLAMLQQLSGNESVLDRGRAYGNLGDCYEALGDYEEAIKYYEQYLSVAQSLNRMQDQAKAYRGLGNGHRAMGSLQQALVCFEKRLVVAHELGEAFNKAQAYGELGSLHSQLGNYEQAISCLERQLNIARDMKDRALESDAACGLGGVYQQMGEYDTALQYHQLDLQIAEETNNPTCQGRAYGNLGLTYESLGTFERAVVYQEQHLSIAAQMNDLAAKTVSYSSLGRTHHALQNYSQAVMYLQEGLRLAEQLGRREDEAKIRHGLGLSLWASGNLEEAQHQLYRASALFETIRHEAQLSTDYKLSLFDLQTSSYQALQRVLVSLGHHDEALAVAERGRTRAFADLLVERQTGQQDSDPYSPVTIDQILEMVNGQRGLVLYYSLAAGYLYSWLLAPGAGIVKFHEHYLGENTVENSSDFQASSSVTLPTATGSALEQHIASVREALGVESHYSSIRNGHCRSLPCYLSLFHVSTAGHQDYKGTWVYDTCHLKSLHM

SEQ ID NO: 10184 - protein, 1408 aa, Homo sapiens
  DOMAIN (1219)..(1268): Eukaryotic RNA polymerase II heptapeptide repeat proteins domain identified by eMATRIX, accession number BL00115Z, p-value= 2.125e-09, raw score of 3.12
EAVLCSSRGRPDSSMPDCCRNAALEARSCQSMTSLFSNTVSPTQDGTSSLPRRQSSFAKPPLRALYDLLIAPMEGGVVESTEPLGTSRSGFASGTALFWLGDNGKAASPPGVSVSSLENEDDNTQCNRLEQGYREAAVPDWTQDLALCLLPTLQSLKARTAPHLCVPSSCYKAWYTLAVSKVSGMVEGKAWIILLLLAASTHALLQRPQEGDITPLAGSRAAAVSCQARPFSTFSGLMHSSGPVGRHRQLILVLEGELYLIPFALLKGSSSNEYLYERFGLLAVPSIRSLSVQSKSHLRKNPPTYSSSTSMAAVIGNPKLPSAVMDRWLWGPMPSAEEEAYMVSELLGCQPLVGSVATKERVMSALTQAECVHFATHISWKLSALVLTPSMDGNPASSKSSFGHPYTIPESLRVQDDASDGESISDCPPLQELLLTAADVLDLQLPVKLVVLGSSQESNSKVTADGVIALTRAFLAAGAQCVLVSLWPVPVAASKMFIHAFYSSLLNGLKASAALGEAMKVVQSSKAFSHPSNWAGFMLIGSDVKLNSPSSLIGQALTEILQHPERARDALRVLLHLVEKSLQRIQNGQRNAMYTSQQSVENKVGGIPGWQALLTAVGFRLDPPTSGLPAAVFFPTSDPGDRLQQCSSTLQSLLGLPNPALQALCKLITASETGEQLISRLHQVLVQLQAGEKEQDLASAPIQVSISVQLWRLPGCHEFLAALDMGKPQAQMLAEGPCRHSMKLHKEPYSAHVQDLESSRRKQMLIFFVPLGFDLCEVGQEEVILKTGKQANRRTVHFALQSLLSLFGPDRSGHSGHVGLGDFQALGTHPARLMFLRAKLATVGRANAGLEGGYGLQVEPTGSAEDSTELPKRLSLDSSSSLESLASAQSVSNALPLGYQQPPFSPTGADSIASDAISVYSLSSIASSMSFVSKPEGGSEGGGPGGRQDHDRSKNAYLQRSTLPRSQLPPQTRPASNKDEEEYEGFSIISNEPLATYQENRNTCFSPDHKQPQPGTAGGMRVSVSSKGSISTPNSPVKMTLIPSPNSPFQKVGKLASSDTGESDQSSTETDSTVKSQEESNPKLDPQELAQKILEETQSHLIAVERLQRSGGQVSKSNNPEDGVQAPSSTAVFRASETSAFSRPVLSHQKSQPSPVTVKPKPPARSSSLPKVSSGYSSPTTSEMSIKDSPSQHSGRPSPGCDSQTSQLDQPLFKLKYPSSPYSAHISKSPRNMSPSSGHQSPAGSAPSPALSYSSAGSARSSPADAPDIDKLKMAAIDEKVQAVHNLKMFWQSTPQHSTGPMKIFRGAPGTMTSKRDVLSLLNLSPRHNKKEEGVDKLELKELSLQQHDGAPPKAPPNGHWRTETTSLGSLPLPAGPPATAPARPLRLPSGNGYKFLSPGRFFPSSKC

SEQ ID NO: 10185 - protein, 1396 aa, Homo sapiens
  DOMAIN (1168)..(1217): Eukaryotic RNA polymerase II heptapeptide repeat proteins domain identified by eMATRIX, accession number BL00115Z, p-value= 2.125e-09, raw score of 3.12
  misc_feature (1)...(1396): Xaa = X or * as defined in Table 2
ALDFPGRRFRPTASFIWASVLFETIRHEAEVSTDYKLSLFDLQTSSYQALQRVLVSLGHHDEALAVAERGRTRAFADLLVERQTGQQDSDPYSPVTIDQILEMVNGQRGLVLYYSLAAGYLYSWLLAPGAGIVKFHEHYLGENTVENSSDFQASSSVTLPTATGSALEQHIASVREALGVESHYSRACASSETESEAGDIMDQQFEEMNNKLNSVTDPTGFLRMVRRNNLFNRSCQSMTSLFSNTVSPTQDGTSSLPRRQSSFAKPPLRALYDLLIAPMEGGLMHSSGPVGRHRQLILVLEGELYLIPFALLKGSSSNEYLYERFGLLAVPSIRSLSVQSKSHLRKNPPTYSSSTSMAAVIGNPKLPSAVMDRWLWGPMPSAEEEAYMVSELLGCQPLVGSVATKERVMSALTQAECVHFATHISWKLSALVLTPSMDGNPASSKSSFGHPYTIPESLRVQDDASDGESISDCPPLQELLLTAADVLDLAAALXRLVVLGSSRESTSKFTADGVFALTRAFLAAGAQCVLGSLWPVPVAAFKMFIHAFYSSLLNGLKASAALGEAMKVVQSSKAFSHPSNWAGFMLIGSDVKLNSPSSLIGQALTEILQHPERARDALRVLLHLVEKSLQRIQNGQRNAMYTSQQSVENKVGGIPGWQALLTAVGFRLDPPTSGLPAAVFFPTSDPGDRLQQCSSTLQSLLGLPNPALQALCKLITASETGEQLISRAVKNMVGMLHQVLVQLQAGEKEQDLASAPIQVSISVQLWRLPGCHEFLAALGFDLCEVGQEEVILKTGKQANRRTVHFALQSLLSLFDSTELPKRLSLDSSSSLESLASSLQSVSNALPLGYQQPPFSPTGADRIASDAISVYSLSSIASSMSFVSKPEGGSEGGGPGGRQDHDRSKNAYLQRSTLPRSQLPPQTRPAGNKDEEEYEGFSIISNEPLATYQENRNTCFSPDHKQPQPGTAGGMRVSVSSKGSISTPNSPVKMTLIPSPNSPFQKVGKLASSDTGESDQSSTETDSTVKSQEESNPKLDPQELAQKILEETQSHLIAVERLQRSGGQVSKSNNPEDGVQAPSSTAVFRASETSAFSRPVLSHQKSQPSPVTVKPKPPARSSSLPKVSSGYSSPTTSEMSIKDSPSQHSGRPSPGCDSQTSQLDQPLFKLKYPSSPYSAHISKSPRNMSPSSGHQSPAGSAPSPALSYSSAGSARSSPADAPDIDKLKMAAIDEKVQAVHNLKMFWQSTPQHSTGPMKIFRGAPGTMTSKRDVLSLLNLSPRHNKKEEGVDKLELKELSLQQHDGAPPKAPPNGHWRTETTSLGSLPLPAGPPATAPARPLRLPSGNGYKFLSPGKIFSLLSKCLKHLLLPIDFEQACRWGPGVCFSPSLSAFPSQPPAPS

SEQ ID NO: 10186 - protein, 217 aa, Homo sapiens
  misc_feature (1)...(217): Xaa = X or * as defined in Table 2
SAQMAVTTADPRVRPRVRTQLCSLATSNRHAWCILSPEEKSAVTALWGKVNVDEVGGKALGRLLVVLPLVPDRFFESFGDLSTPDAVNGQTPKVKVSWSRKCLGAFSDGPGFTWDNLQGSPLPTLKXACTCXQACTWDPXRTFRLPGGNVAGFVVAWAHSLLGKEFQPHQCKLAXSRKLVGLVLAKCPWPHKYHLKLAFLAVQFLFKGFLWSLKTNY

SEQ ID NO: 10187 - protein, 170 aa, Homo sapiens
  DOMAIN (56)..(78): Globins profile domain identified by eMATRIX, accession number BL01033A, p-value=2.800e-16, raw score of 16.94
  misc_feature (1)...(170): Xaa = X or * as defined in Table 2
SAQMAVTTADPRVRPRVRTQLCSLASLIQTRMVHLTPVEKSAVTALWGKVNVDEVGGKALGRLLVVYPWTQRFFESFGDLSTPXSLLRANPXGERLHGKKSASVPFSDGLAHLDNLKGTFAHTEVSLHCDKLHRGSLKNFRLLGQRAWSVVAGPIHFWEKNFNPTSCRLA

SEQ ID NO: 10188 - protein, 284 aa, Homo sapiens
  DOMAIN (116)..(195): Ribosomal protein L13e domain identified by PFam, accession name Ribosomal_L13e, E-value=3.9e-20, PFam score of 73.2
  misc_feature (1)...(284): Xaa = X or * as defined in Table 2
TPHFHQGTGKRAAWPTWFNPAGPGIFLRRXGPGKAQRRRSIAPRPAVGFPSGPIVRCPHGFGYPHERLRAGPRLPALRKLRVAGIHKEGWPGPIGISVDPRKPDQVPRSPLQANVQRLKKYASNFILFPQRSPRAPKKGDRSAEELKLGHPSLTGPVMPVRNVYKKEKARVITEEEKNFKAFASLRMARANAPALRHTGQKEPREAAEQGCXKAHNKALPGDLESVGQSCWVSTWCVSWEQLGLGWGFTAVTSSCQGIWGFLERQSKPWIMLNLLVLKPCWLFG

SEQ ID NO: 10189 - protein, 534 aa, Homo sapiens
  DOMAIN (326)..(347): COMPLEMENT C9 SIGNATURE domain identified by eMATRIX, accession number PR00764B, p-value=9.375e-11, raw score of 13.56
  DOMAIN (65)..(176): CUB domain identified by PFam, accession name CUB, E-value= 4.5e-26, PFam score of 100.0
  misc_feature (1)...(534): Xaa = X or * as defined in Table 2
MKLLKSILLTILLDFSLHTCASLVPALQWILLLLITVLVVEGIAVAQKTQDGQNIGIKHIPATQCGIWVRTSNGGHFASPNYPDSYPPNKECIYILEAAPRQRIELTFDEHYYIEPSFECRFDHLEVRDGPFGFSPLIDRYCGVKSPPLIRSTGRFMWIKFSSDEELEGLGISEQIIPFIPDPDFTYLGRYFKFPSHDCQFEHLRELDGDSAALVRXNKRRKQNQGQAFDCIWDLXMPFQKLKIYLRFLDYQMEHSNECKRNFVAVYDGSSSIENLKAKFCSTVANDVMLKTGIGVIRMWADEGSRLSRFRMLFTSFGGASPAQAALSFCHSNMCINNSLVCNGVQNCAYPWDENHCKEKKKAGVFEQITKTHGTIIGITSGIVLVLLIISILVQVKQPRKKVMACKTAFNKTGFQEVFDPPHYELFSLRDKEISADLADLSEELDNYQKMRRSSTASRCIHDHHCGSQASSVKQSRTNLSSMELPFRNDFAQPQPMKTFNSTFKKSSYTFKQGHECPEQGPGKDRVMGGRFPC

SEQ ID NO: 10190 - protein, 76 aa, Homo sapiens
HQELLLFLLLSSRRLSRSPSEGSRPTMALGEKKIGFPSLLWCFPPSAAGASSQIKWIQPCGSGAPPLPGCSGKRRA

SEQ ID NO: 10191 - protein, 54 aa, Homo sapiens
  misc_feature (1)...(54): Xaa = X or * as defined in Table 2
HQELLLFLLLSSRRLSRSPSEGSRPTMVLEKRKXGFHPHSCLRAWRLKVCEGKS

SEQ ID NO: 10192 - protein, 88 aa, Homo sapiens
  misc_feature (1)...(88): Xaa = X or * as defined in Table 2
LWAARAAVLTSLLPTGSPSAALSGCCRPGGQGRYSVAACRGRAAGGVAPVPAHTXAAAPLGHFSFLLGIVSPAPEPHFELGHYYSGLS

SEQ ID NO: 10193 - protein, 265 aa, Homo sapiens
  misc_feature (1)...(265): Xaa = X or * as defined in Table 2
MSRERPPGTDIPRNLSFIAALDGARLLPXPAAQPRGGAGGGARRGRDAVRGPIPRSRTESGPSGPDLHQPEAAGPGRPCSRSPDTRKRVRFADALGLELAVVRRFRPGELPRVPRHVQIQLQRDALRHFAPCQPRARGLQEARAALEPASEPGFAARLLTQRICLERAEAGPLGVAGSARVVDLAYEKRAPAAYAGPAPPPPRADRFAFRLPAPPIGGALLFALRYRVTGHEFWDNNGGRDYALRGPEHPGSGGAPEPQGWIHFI

SEQ ID NO: 10194 - protein, 311 aa, Homo sapiens
  DOMAIN (164)..(178): PROTEIN SH3 DOMAIN REPEAT PRESYNA domain identified by eMATRIX, accession number PD00289, p-value=4.103e-09, raw score of 9.97
  misc_feature (1)...(311): Xaa = X or * as defined in Table 2
ARRILQNFSLYPSGEDLKGYKVIQAQTAFSANPANPAILTEASAPIPHDGNLYPRLYPELSQYMGLSLNEEEIRANVAVVSGAPLQGQLVARPSSINYMGGLLLTGXLMLGIRRSRIIXGKGFREVILCKDQDGKIGLRLKSIDNGIFVQLVQANSSSLIGLVXEFGDQVLQINGENCAGWSSDKAPRWSNRPFXEKITMTIRDRPFERTITMHKDSTGHVGFIFKNGKITSIVKDSSAARNGLLTGPNLCGNSMGQNVIGLKDSQIADILSTSGTVGTITIMPAFIFEHIIKRMAPSIMKSLMDHTIPEV

SEQ ID NO: 10195 - protein, 90 aa, Homo sapiens
  misc_feature (1)...(90): Xaa = X or * as defined in Table 2
AWVPCLLRHCDREPAPRGRTSPSLWPQEGTPGQDRGGGPWLGQPSLQXQRSHGGHLPAPQGPLGGPHDNSSFRPGRGGAGRGQGIEQGSK

SEQ ID NO: 10196 - protein, 126 aa, Homo sapiens
  misc_feature (1)...(126): Xaa = X or * as defined in Table 2
GQRGRGLRKGSGASGAGMMEHTHTEAHPHTWVCTSTHTCTHTLGDTDYMHLHVCVSIHMYVCPHTMSLALGMSAHTLHMFSHTKLLSRXHAGRHVPMPKQVTCTYVPTPSPTHVLGHACGCRPHAS

SEQ ID NO: 10197 - protein, 90 aa, Homo sapiens
  misc_feature (1)...(90): Xaa = X or * as defined in Table 2
GPARNPAQCRWAGTAGGPSTLSAAAGPGAKPLMPGAAGAGQAGWLLXVQGPPSPRPPGTLAGPQARHTALVPARASPSTPPCKLRGGLRP

SEQ ID NO: 10198 - protein, 121 aa, Homo sapiens
  DOMAIN (76)..(118): Phosphoenolpyruvate carboxylase proteins 1 domain identified by eMATRIX, accession number BL00781J, p-value=8.091e-10, raw score of 9.63
  misc_feature (1)...(121): Xaa = X or * as defined in Table 2
GLLFPQHCPAHRPRRCLRPRSSAGRGSAPALSRPSALCHLCLPRSSLSAPRSVSPAATPHHXALQGLVEPWGPLHSAPLHRXAPASGPAGNVRAWPACRGWCLSRPPLPGTVGEGAASRAF

SEQ ID NO: 10199 - protein, 196 aa, Homo sapiens
  DOMAIN (1)..(62): PH domain identified by PFam, accession name PH, E-value= 0.0034, PFam score of 16.5
HYGRLDCKCITLFQNNTTNRYYKEFPLSEILTVESAQNFSLVPPGTNPHCFEIVTANATYFVGEMPGGTPGGPSGQGAEAARGWETAIRQALMPVILQDAPSAPGHAPHRQASLSISVSNSQIQENVDIATVYQIFPDEVLGLGCPRTGISVGPVHHRTTTCRGWRSASVFSEVLCPRPAAALHSGSSQDPSNELF

SEQ ID NO: 10200 - protein, 69 aa, Homo sapiens
DPVPPSPDAPAPGSELAALLLGRDRLLQVPELERAASEAVSRADWIAAEVVALVTVRSAKSPRLTSPPR

SEQ ID NO: 10201 - protein, 127 aa, Homo sapiens
  DOMAIN (31)..(111): PH domain identified by PFam, accession name PH, E-value= 0.0051, PFam score of 15.9
EGGKAHSFLGHIPLMRVEQSVRHTTRKSSTTLREGRVVHYSNKDTLKKRHYWRLDCKSITLFQNNTTNRHYKEIPLAEILTAEPAQNFSLVPPGTNPHCFEIGTANATYFVGEMPGGTPGGPSGHGA

SEQ ID NO: 10202 - protein, 95 aa, Homo sapiens
RPPGPSRSPPAPPPSSRRPLPKMACCACCARVTAGPVPGLGWGVGGPGQRSPVTRRARPPSGLLGFEARPLVPWTSRSPFRCQCTACGHLVEFVL

SEQ ID NO: 10203 - protein, 1088 aa, Homo sapiens
  DOMAIN (491)..(507): Phorbol esters / diacylglycerol binding domain proteins domain identified by eMATRIX, accession number BL00479B, p-value= 7.429e-18, raw score of 12.57
  DOMAIN (340)..(515): Phorbol esters/diacylglycerol binding dom domain identified by PFam, accession name DAG_PE-bind, E-value=2e-38, PFam score of 141.1
  misc_feature (1)...(1088): Xaa = X or * as defined in Table 2
VIQTSLSPSPATNDRGHPFSLDNWTGKPVHSMVAHLDAVTCLAVDPNGAFLMSGSHDCSLRLWSLDNKTCVQEITAHRKKHEEAIHAVACHPSKALIASAGADALAKAHKEQGGKRLHLPVEDDGFGAQAPPCWEEVPQGTNAQFLGCKGLCPSPPAGPSEHTRKDGGRCLDTQDMAAFCWDSHLPFRKKGAELQSPPPLLPQIPAPGSGVSFHIQIGLTREFVLLPAASELAHVKQLACSIVDQKRPRVQVPRPPPPLSQEPRKVLLPARPTPVLGLEPVPECGFYGLYDKILLFKHDPTSANLLQLVRSSGDIQEGDLVEVVLSASATFEDLQIRPHALTVHSYRAPAFCDHCGEMLFGLVRQGLKCDGCGLNYHKRCAFSIPNNCSGARKRRLSSTSLASGHSVRLGTSESLPCTAEELSRSTTELLPRRPPSSSSSSSASSYTGRPIELDKMLLSKVKVPHTFLIHSYTRPTVCQACKKLLKGLFRQGLQCKDCKFNCHKRCATRVPNDCLGEALINGDVPMEEATDFSEADKSALMDESEDSGVIPGSHSENALHASEEEEGEGGKAQSSLGYIPLMRVVQSVRHTTRKSSTTLREGWVVHYSNKDTLRKRHYWRLDCKCITLFQNNTTNRYYKEIPLSEILTVESAQNFSLVPPGTNPHCFEIVTANATYFVGEMPGGTPGGPSGQCGXGRPVAWETAIRHALIPVILQDAPSAPGHAPPKQASLGISVSNSQIQKNVDIATVYQIFPDEVLGSRQFGVVYGGKHRKTSRDVAVKAIDKLRFPTKQESQLRNEVAILQSLRTPGIVNLECMFETPEKVFVVMEKLHGDMLEMILSSEKGRLPERLTKFLITQILVAFRQLHFKNIVHCDLKPEIVLLASADPFPQVKLCDFGFARIIGEKSFRRSVGGARRPYLGNPRLWLNQGYNRSLDMWSVGVIMYVSLSGTFPFNEDEDINDQIQNAAFMYPWPAPWEATSSAGSHLTFIQQPCCRLKMRKRYSVDKSLSHPWLQEYQTWLDLRELEGKMGERYITHESDETRWEQVCEQSIRCPGSWAAPRTGISVGACPTTGPRTCKGLAERISVL

SEQ ID NO: 10204 - protein, 142 aa, Homo sapiens
EDGSLATFLGRRQFAFAEMRHSKRTHCPDWDSRESWGHESYRGSHKRKRRSHSSTQENRHCRPHHQFKESDCCSMCIPLEASHSVEEDTHPSHYLEARSLNERDYRDRRYVDEYRNDYCEGYVPRHYHRDIESGYRIHCSRS

SEQ ID NO: 10205 - protein, 491 aa, Homo sapiens
  DOMAIN (282)..(313): Protein kinases ATP-binding region proteins domain identified by eMATRIX, accession number BL00107A, p-value=6.040e-13, raw score of 18.39
  DOMAIN (167)..(488): Eukaryotic protein kinase domain identified by PFam, accession name pkinase, E-value=1.7e-64, PFam score of 227.7
  misc_feature (1)...(491): Xaa = X or * as defined in Table 2
GDGAAAILWGVCRSGRGGKTAVWRHFSAEGPFAFAEMRHSKRTHCPDWGSIESWGHESYRGSHKRTRISHSRSQENRHCKPHHQFKESDCHYLEARSLNERDYRDRRYVDEYRNDYCEGYVPRHYHRDIESGYRIHCSKSSVRSRRSSPKRKRNRHCSSHQSRSMKSVDTLGEGAFGKVVECIDHGMDGMHVAVKIVKNVGRYREAARSEIQVLEHLNSTDPNSVFRCVQMLEWFDHHGHVCIVFELLGLITYDFIKENSFLPFQIDHIRQMAYQICQSINFLHHNKLTHTDLKPENILFVKSDYVVKYNSKMKRDERTLKNTDIKVVDFGSATYDDEHHSTLVSTRHYRAPEVILALGWSQPCDVWSIGCILIELYPWGSQFFRLQXXKEHLAMMERNIRTPYPQHMIQKTRKRKYFHPXPSLDWDEHSSCAGRYVRRRCKPLKEFMLCHDEEHEKLFDLVRRMLEYDPTQRITLDEALQHPFFDLLKKK

SEQ ID NO: 10206 - protein, 57 aa, Homo sapiens
TSVTSDNLSRHDMLAWINESLQLNLTKIEQLCSGAAYCQFMDMLFPGSIALKKVKCV

SEQ ID NO: 10207 - protein, 178 aa, Homo sapiens
MLFPGSIDLKKVKFQAKLEHECIQNFKILQAGFKKLGVDKIIPVDKSVKGKFQDNFEFVQWFKKFFDANYDGKIYDPVAARQVCCLEMEVKHAGDHAASFLDLWQREWSMKAIVTLGSARLGCFRGVGLVVFQEDEERPEIAHPAPLPCEAMCSIRTLQKVPTSKEALTRCSPSTLDF

SEQ ID NO: 10208 - protein, 210 aa, Homo sapiens
  DOMAIN (75)..(175): Zn-finger in Ran binding protein and others domain identified by PFam, accession name zf-RanBP, E-value=6.9e-25, PFam score of 96.1
MKPWTFTVSVTVLKDGVSGVCYFRCSDVSGVSYFWWVRGLADFRSEAMDLVASVTALNGGVDPKRTGFGDKFKPVIGTWDCDTCLVQNKPEAIKCVACETPKPGTCVKRALTLTVVSESAETMTASSSSCTVTTGTLGFGDKFKRPIGSWECSVCCVSNNAEDNKCVSCMSEKPDDFFGGVEHLAQGWPCSMTWSDTKGFPQTQGDSLRW

SEQ ID NO: 10209 - protein, 108 aa, Homo sapiens
LEKERDFYFGKLRNIELICQENEGENAPVLQRIVDILYATDEGFVIPDEGGPQEEQEEYYSLGPAEQHGYSSLQIMCLTVKYSLLLSLEDSLVSFHKQKVPLLKVPVF

SEQ ID NO: 10210 - protein, 305 aa, Homo sapiens
  misc_feature (1)...(305): Xaa = X or * as defined in Table 2
SSRGRAGGVWRFERDEDGTGAGCGQWTRFCREPKMAVNVYSTSVTSDNLSRHDMLAWINESLQLNLTKIEQLCSGAAYCQFMDMLFPGSIALKKVKFQAKLEHEYIQNFKILQAGFKRMGVDKIISVDKLLKGKFQDNFEFVQWFKKFFDANYDGKDYDPVAARQGQETAVAPSLVAPALNKPKKPLTSSSAAPQRPISTQRTAAAPKGWALGVVRKNPGVGNGDDEAAELMQQGQRIXNLLFEDLGGKERDFYFGKLRNIELICQENEGENDPVLQRIVDILYATDEGFVILDEGGPQEEQEEY

SEQ ID NO: 10211 - protein, 190 aa, Homo sapiens
  misc_feature (1)...(190): Xaa = X or * as defined in Table 2
CNRNTSTLTRTCTNVCINTPRPAPPLLAPQATLHFQFPXPPLPLXXQPQALSATRLSLVCHGSGLRLLPLLQAAPGWLPSLGPLSLFSCRGRVLLCXPGWSCYLGLKLSSHLGLPKCWDDRPKPPSPASFEWAPTRPNPLPQHGTQSQCLFSVGEAPRPHSGSAYYTNQCLQCSRPCSERTRRLGVLLPK

SEQ ID NO: 10212 - protein, 76 aa, Homo sapiens
MAMELINNKHWPSVRALCWNTVLAYVIGEGVNSGRSCLAQTLVTFPRKGSAFRDWVLGPAPGGNGALRLFRKILFC

SEQ ID NO: 10213 - protein, 198 aa, Homo sapiens
SSPLRVAVVCSSNQNRSMEAHNILSKRGFSVRSFGTGTHVKLPGPAPDKPNVYDFKTTYDQMYNDLLRKDKELYPSGLPFKNPPCGPPWEGVTCGLGHRRRVTLCSANTGSSVFCESLVSISGARRIVHGSPGNLRLEKSLRISEELSGHVLVHPVWGTASTWLCSRRGLRRSRPGKYLPRSARTESSFSSLIRKDLV

SEQ ID NO: 10214 - protein, 228 aa, Homo sapiens
  misc_feature (1)...(228): Xaa = X or * as defined in Table 2
TSRGRVGTQAGEPRDLRPPPCPSSPLRVAVVCLEQPERGAWEAHNIPQPNGDSAVRSFGTGTHVKLPGPAPDNPNVYDFKTTYDQMYNDLLRKDKELFTQNGILHIAGRNKRIKPGPERFQNCKDLFDLILTCEERVYDRVGWKIXISREQGDLPSPVHVVNLDIQDNHEEATLGARFLICEVCQCIQHTEDMENEIDELLQEFEEKSGRTFLHTVCFILFSFLDICF

SEQ ID NO: 10215 - protein, 62 aa, Homo sapiens
  misc_feature (1)...(62): Xaa = X or * as defined in Table 2
MSEVIGYEAFFLIFASLFIGXXXXXXXXXXXXFFAYSFLFFCSFWTLCVSFLRRPRTSGSYF

SEQ ID NO: 10216 - protein, 478 aa, Homo sapiens
  DOMAIN (227)..(274): kw TRANSCRIPTASE REVERSE II ORF2 domain identified by eMATRIX, accession number DM01354V, p-value=1.000e-40, raw score of 12.97
MGYQASMGQEYGNVLNVCLIRARSLVSLIRGQVVTTDGTPLVGVNVSFVKYPKYGYTITRQDGTLIQSTLIEEHVKSWLVMFGFQLSNIIPGFPRAKMYFVPPPYELSESQASENGQGFSNPSHSPTPTGILHKGTGENQFLTQQPAIITSIMGNGRRRSISCPSCNGLAEGNKLLAPVALAVGIDGSLYVGDFNYIRRIFPSRNVTSILELRPSHRNHLGILGSFWVCMKRIKYLGIQLTRDVKDLFKENYKPLLKEIKEDTNKWKNLPCSWVGRINIVKMAILPKVTVKCLKEELLHGLASIKEVPANCDTAGRVVPHKGKDKDAMTGAAGMSLGALEKLPGGGVSCVPKPSTTSFAMKPPVPISGYLLDISVSRQAPQTTNRKLNPVLVSNNFASGLFCHYRVSCVPKPSTTSSAMKPQVSVSRYPLDIISVSRQARQTTTNRKLNPILVSNNFASCLFCHYHERVPAQSNTTQR

SEQ ID NO: 10217 - protein, 277 aa, Homo sapiens
MPSTIKGSRGDKKESVQVKGAERQRKGYRVGVTNGRFPLRSVSPSDSSPCNNPAHKYYLAVDPVSGSLYVSDTNSRRIYRVKSLSGTKDLAGNSEVVAGTGEQCLPFDEARCGDGGKAIDATLMSPRGIAVDKNGLMYFVDATMIRKVDQNGIISTLLGSNDLTAVRPLSCDSSMDVAQDHAYALPHSDVGLVLDKAVLCQLCTASPSQACLLHSRTRTAQAARPVSGDKERAWASRLQFGFVQSHVTGAESALANFGLRGAEKHITLKKRPSRRQK

SEQ ID NO: 10218 - protein, 104 aa, Homo sapiens
  DOMAIN (53)..(98): kw TRANSCRIPTASE REVERSE II ORF2 domain identified by eMATRIX, accession number DM01354N, p-value=9.385e-11, raw score of 13.17
  misc_feature (1)...(104): Xaa = X or * as defined in Table 2
FFFLLLILFLLLIQYHYIFYTFLLWLRLLVLTGSIXCXKCKITMNSTXIETVFKDYYEHLYVCKLKNLEKTDKVLTIHNFLRLNQXEPEVLTRAKMYKIYNDIE

SEQ ID NO: 10219 - protein, 107 aa, Homo sapiens
  misc_feature (1)...(107): Xaa = X or * as defined in Table 2
RRLQKPGCLIWTRGSTXCPLTLLLPSRGAGLGTCKPAMPEPPTHSMGTCAARASPTSTTPCSTCAQSHRPGRNKQPKGXGMRAHGAGLAGSSTCSPGVGSTGXSQGL

SEQ ID NO: 10220 - protein, 417 aa, Homo sapiens
MGFSMLARILMQNASLRTSDSGMYRTGIPNCLGQFGLLQQKYHRLGGLNNKHLFLAVLEAGKSKIKAPADSVSDGLVDCLDPDCCLQSACQNSLLCRGSRDPLDIIQQGQTDWPAVKSFYDRIKLLAGKDSTHIIPGENPFNSSEHLSPGHASHVLHRSLSRHAWVHGRNLLSIDYDRNIRTEKIYDDHRKFTLRIIYDQVGRPFLWLPSSGLAAVNVSYFFNGRLAGLQRGAMSERTDIDKQGRIVSRMFADGKVWSYSYLDKDGCGKKSTGCLRKSRLCYQRQKSDSGHIAFIQYEAASPGEQQLYVFNADGIHQYTVSLVTGEYLYIFTYSTDNDVTELIDNNGNSLKIRRDSSGMPRHLLMPDNQIITLTVGTNGGLKVVSTQNLELGLMTYDGNTGLLATKSDETGWTTFYE

SEQ ID NO: 10221 - protein, 1781 aa, Homo sapiens
  DOMAIN (409)..(565): NHL repeat domain identified by PFam, accession name NHL, E- value=0.00014, PFam score of 28.7
  misc_feature (1)...(1781): Xaa = X or * as defined in Table 2
MAGWLRAWLDGWLTGWLAGCMSEWMMDGWMDGWIDGWMDGWNPIVPETQVLHEEIELPGSNVKLRYLSSRTAGYKSLLKITMTQSTVPLNLIRVHLMVAVEGHLFQKSFQASPNLAYTFIWDKTDAYGQRVYGLSDAVVSVGFEYETCPSLILWEKRTALLQGFELDPSNLGGWSLDKHHILNVKSGILHKGTGENQFLTQQPAIITSIMGNGRRRSISCPSCNGLAEGNKLLAPVALAVGIDGSLYVGDFNYIRRIFPSRNVTSILELRNKEFKHSNNPAHKYYLAVDPVSGSLYVSDTNSRRIYRVKSLSGTKDLAGNSEVVAGTGEQCLPFDEARCGDGGKAIDATLMSPRGIAVDKNGLMYFVDATMIRKVDQNGIISTLLGSNDLTAVRPLSCDSSMDVAQVRLEWPTDLAVNPMDNSLYVLENNVILRITENHQVSIIAGRPMHCQVPGIDYSLSKLAIHSALESASAIAISHTGVLYITETDEKKINRLRQVTTNGEICLLAGAASDCDCKNDVNCNCYSGDDAYATDAILNSPSSLAVAPDGTIYIADLGNIRIRAVSKNKPVLNAFNQYEAASPGEQELYVFNADGIHQYTVSLVTGEYLYNFTYSTDNDVTELIDNNGNSLKIRRDSSGMPRHLLMPDNQIITLTVGTNGGLKVVSTQNLELGLMTYDGNTGLLATKSDETGWTTFYDYDHEGRLTNVTRPTGVVTSLHREMEKSITIDIENSNRDDDVTVITNLSSVEASYTVVQDQVRNSYQLCNNGTLRVMYANGMGISFHSEPHVLAGTITPTIGRCNISLPMENGLNSIEWRLRKEQIKGKVTIFGRKLRVHGRNLLSIDYDRNIRTEKIYDDHRKFTLRIIYDQVGRPFLWLPSSGLAAVNVSYFFNGRLAGLQRGAMSERTDIDKQGRIVSRMFADGKVWSYSYLDKSMVLLLQSQRQYIFEYDSSDRLLAVTMPSVARHSMSTHTSIGYIRNIYNPPESNASVIFDYSDDGRILKTSFLGTGRQVFYKYGKLSKLSEIVYDSTAVTFGYDETTGVLKMVNLQSGGFSCTIRYRKIGPLVDKQIYRFSEEGMVNARFDYTYHDNSFRIASIKPVISETPLPVDLYRYDEISGKVEHFGKFGVIYYDINQIITTAVMTLSKHFDTHGRIKEVLAYEMFRSLMYWMTVQYDSMGRVIKRELKLGPYANTTKYTYDYDGDGQLQSVACNDRPTWRYSYELNGNLHLLNPGNSVRLMPLRYDLRDRITRLGDVQYKIDDDGYLCQRGSDIFEYNSKGLLTRAYNKASGWSVQYRYDGVGRRASNKTNLGHHLQYFYSDLHNPTRITHVYNHSNSEITSLYYDLQGHLFAMESSSGEEYYVASDNTGTPLAVFSINGLMIKQLQYTAYGEIYYDSNPDFQMVIGFHGGLYDPLTKLVHFTXRDYDVLAGRWTSPDYTMWKNVGKGAGPPFKPYMFKSNNPLSSELDLKNYVTGEDSATKDVKSWLVMFGFQLSNIIPGFPRAKKYFVPPPYELSESQASENGQLITGVQQTTERHNQAFMALEGQVITKKLHASIREKAGHWFVTTTPIIGKGIMLAIKEGRVTTGVSNIASEDSRKVASVLNNAYYLDKMHYSIEGKDTHYFVKIGSADGDLVTLGTTIGRKVLESGVNVDLVSKPTLLVNGRTRRFTNMEFRTSRWWFSIRYGPNPRTLGRREKAAVLDQARRQRALGTAWAKEQQKARDGREGSRLWTEGEKQQLLSTGRVQGYEGYYVLPVEQYPELADSSSNIQFLRQNEMGKR

SEQ ID NO: 10222 - protein, 63 aa, Homo sapiens
RCSMRVHQSQPLSSVESTGAHHEKMSYQSTHDGCGDFCLPEFKNKWLSWSLQTFLGCMGDRTA

SEQ ID NO: 10223 - protein, 52 aa, Homo sapiens
GRTCSEEARPGAVACRAGDMDPLFQQTHKQVHEIQSCMGRLETADKQSVHSE

SEQ ID NO: 10224 - protein, 639 aa, Homo sapiens
  misc_feature (1)...(639): Xaa = X or * as defined in Table 2
MRPPPALALAGLCLLALPAAAASYFGRQSRSLMPSRDPHAGALSAAILASGEPSLPRTPSPPSAFALRSGDREGWVDGWDGLFPVSGQRIVRVQGEWGKPRTSFAFDYNTKCFGILIREYANIRRAGNIYVFGPLMNDCPQQMASSLQAKTWAAFAHQCSAAKGQLHTELLHEDALKKWTSPAMGWERSRSHDKPRRLSRPLVPPRPFPRAPCAGSSRVRRGLADQKGQQFPTQRSLLPTGSASFTPDRGCAESWCLRPRALIGCSLTSSNPAAPRWAREGGGCGWRCASDKPESHFQSQVDFVPTIGGVAPPLHGRGQTSSSAPLLMEPHLLGLLLGLLLGGTRVLAGYPIWWCWAQGCVAVNIFADIYLWVRAILILHLYIHVILYAGKWSQWAMGAGEKVLRSEAETRFFSVRQPVPREHSGYPRQVHEIQSCMGRLDTADKQSGHIVENEIQASIDQIFSRLERLEILSSKEPPNKRQNGRLFRVNSLKYDVQHLQTALRNFQHRRHAREQQERQRERAFCRSKPFTTXTTLDTTITNWDRIHLQFXLPSLPRKFHNGHGIDLILDGHNILDGLRTQRLTLKGTQKKILDIANMLGLSNTVMRLIEKRAFQDKYFMIGGMLLTCVVMFLVVQYLT

SEQ ID NO: 10225 - protein, 187 aa, Homo sapiens
  misc_feature (1)...(187): Xaa = X or * as defined in Table 2
FSGRPTRPRPGAVACRAGDMDPLFQQTHKQVHEIQSCMGRLETADKQSVHIVENEIQASIDQIFSRLERLEILSSKEPPNKRQNAKLRVDQLKYDVQHLQTALRNFQHRRHAREQRRRQREELLSRTFTTNGTQKKDPLTLPNMLGLSNTVMRLIEKRAFPQDKYFMIGGHPAXPLWALFLWFQYRT

SEQ ID NO: 10226 - protein, 32 aa, Homo sapiens
FSSGLLPIHFQCLASYENYMKILNKSNAVVGV

SEQ ID NO: 10227 - protein, 72 aa, Homo sapiens
  misc_feature (1)...(72): Xaa = X or * as defined in Table 2
GSHPFAQAGVQWCVCSTLQPLNSXSSNLSLHSCWDYKFKLVCICKGDGKEFLHMHILKKDVTLTEKLIPRYV

SEQ ID NO: 10228 - protein, 225 aa, Homo sapiens
  DOMAIN (27)..(71): GTP-binding nuclear protein ran proteins domain identified by eMATRIX, accession number BL01115A, p-value=1.000e-40, raw score of 10.22
  DOMAIN (28)..(206): Ras family domain identified by PFam, accession name ras, E- value=2.7e-47, PFam score of 170.6
PPSFQPQSDGRGDASGRNAAMAAQGEPQLVLVGDGGTGKTTFVKRHLTGEFEKKYVATLGVEVHPLVFHTNRRPIKFNVWDTARQEKFGGLRDGYYIQAQCAIIMFDVTSRVTYKNVPNWHRDLVRVCENIPIVLCGNKVDIKDRKVKAKSIVFHRKKNLQYYHICAKSNYNFEKPFLWLARKLIGDPNLEFVAMPALAPPEVVMDPAFASTYEHDLEVAQTTAL

SEQ ID NO: 10229 - protein, 183 aa, Homo sapiens
  DOMAIN (132)..(155): GTP-BINDING NUCLEAR PROTEIN RAN/TC4 FAMILY SIGNATURE domain identified by eMATRIX, accession number PR00627E, p-value=1.529e- 24, raw score of 14.59
  DOMAIN (12)..(156): Ras family domain identified by PFam, accession name ras, E- value=2.4e-18, PFam score of 72.0
MAAQGQPQVQFKLVLVGDGGTGKTTFVKHHLTGEFEKKYVATLGVEVHPLVFHTNRGPVKFNVWDTAGLEKFSGLRDGYYIQAQSTIIVFDVTSRVTYKNVPNWHRDLKNLQYYDISAKSNYNFEKPFLWLARKLIGDPNLEFVAMPALAPPEVVMDPALAAQYEHDLEVAQTTALPDEDDDL

SEQ ID NO: 10230 - protein, 265 aa, Homo sapiens
  misc_feature (1)...(265): Xaa = X or * as defined in Table 2
ADIDSRGPKMSLQSSSXSRGSWMSGNXWSFSSDPTYSGSGGSAPSPIPTQGAEECGRTAPGLAGSSTCSPGVGSTRXSHFRPTHPSLENLEDIALTNVLQNRFVRAEPASLKSPVIALLCMSDLTVGTTVTQLQHLNTMGVIGSQDGRDQVAALNHQKQGDLWPFPRVTVLWRKGIDQTFWGLLNTGSELTLIPGDPKCRCSPPVKVEAHGCQVINGVLAQIQLTVGLVGPRPVPSTTQGAEECGRTAPGLAGSSTCSPGVGSTR

SEQ ID NO: 10231 - protein, 270 aa, Homo sapiens
  DOMAIN (62)..(77): GTP-BINDING NUCLEAR PROTEIN RAN/TC4 FAMILY SIGNATURE domain identified by eMATRIX, accession number PR00627A, p-value=1.265e- 19, raw score of 10.81
  DOMAIN (50)..(247): Ras family domain identified by PFam, accession name ras, E- value=1.3e-09, PFam score of -27.7
  misc_feature (1)...(270): Xaa = X or * as defined in Table 2
APALAPASAASPAFEFTLPPSFQPQSDGRGDASGRNAAMAAQGEPQVQFKLVLVGDGGTGKTTFVKRHLTGEFEKKYVATLGVEVHPLVFHTNRGPIKFNVWDTAWPWRNSGGLRDGLYIPSPRVPIIMFDVTSRVTYKNVPNWALGDLVTSVCENIPHLCCVANKVDIKDRKVKAKSIVFHRKENFQYYDISAQKVPTNLKKPFLWALLGSLMGDPXLWNLLPMPLLSPPPREVVMEPQLWPATSMKHDLEVASDNCLPPDEDDDPVKK

SEQ ID NO: 10232 - protein, 159 aa, Homo sapiens
  misc_feature (1)...(159): Xaa = X or * as defined in Table 2
PQVISLPKCCDCRCEPLHLAAEKSLPTVRETTKVPGEAKSEFHKNKMDGRGGKPMGGCEGPDAMYVKLISSDGHEFIVKRDHGLTSGTEXKPMLSGPGQFAGGTKTHEVNFREIPSHIAIRKVCNVFFTYKVRATPNSSHPRFPEFPNLAPGNLHWELA

SEQ ID NO: 10233 - protein, 88 aa, Homo sapiens
  misc_feature (1)...(88): Xaa = X or * as defined in Table 2
KYTIKTKTVLKKSGIFSTCPKPKSCYDFVPLNAGPIPPKSILGTNGPTHTLEMLDXRLNKPTPISPQRSPLTQVGHRXTRPTRRRPRT

SEQ ID NO: 10234 - protein, 132 aa, Homo sapiens
  misc_feature (1)...(132): Xaa = X or * as defined in Table 2
KSLEFFPPALSPSPALILCHLMQAPYHLKVSWEPTDPPTALEMLDXRLPLPHAXHKGETHTCGPLSDHTFKAPPDPLQICLLSHQGPASPSQQTHPYQPSEVTADSGGTQVDKANQEEATNTKHHEQEEEQD

SEQ ID NO: 10235 - protein, 484 aa, Homo sapiens
  misc_feature (1)...(484): Xaa = X or * as defined in Table 2
MSAYCLQLGGLQALLALTQTPGHRDSLPDAQPAAVLVCGWPWLASFSERTIVGHKEWTIKDKLKNKFKDEFDIVSLPCTLGSHPQPQDPMLKLPWSITYGRCLAPGDHTVSLVIKLVESASLSLAVSNMLSDMIRWMPAGCGRCLLGLQSESRAVCGQCVGMEQVCRVSGPHIRWIPQPQLHSCLFFLYPSPYPLEPSSNTSFICPHSRTYNGSLLSCIPNSAAAAAPPTPQATSFPSCPSPKQRLPTGRVVEGSDHRVHEARLPGNHSRSRGVDSAPPTLAHAGLLLTEEKTLKENGRRAEALRVGVHWRHGTSQGPGRTLWAEKVKPHFRTRGQVYDASSAPVTEHTATELPAGNQGSQPGLQEGGLEGTVVTLVSWKVTMVSRRCXCRYGQRPHHHLKVLGNQRPTHTLEMLDXRLPLPQRLTPKGKHTPVVPPLLIQPFKAPPDPLQICLLSHQGPASPSQQTHPYQPSEVTADSRWDTR

SEQ ID NO: 10236 - protein, 138 aa, Homo sapiens
MSRQVVRSSKFRHVFGQPAKADQCYEDVRVSQTTWDSGFCAVNPKFVALICEASGGGAFLVLPLGKVINTLSDHHHRGTDFGGSPWLHVIIAFPTSYKVVITLWIVYLWEQAFESSQKYKEGKYIIELNHMIKDNGWD

SEQ ID NO: 10237 - protein, 508 aa, Homo sapiens
  DOMAIN (137)..(148): Trp-Asp (WD) repeat proteins proteins domain identified by eMATRIX, accession number BL00678, p-value=1.474e-09, raw score of 9.67
  DOMAIN (114)..(206): WD domain, G-beta repeat domain identified by PFam, accession name WD40, E-value=4e-12, PFam score of 53.7
  misc_feature (1)...(508): Xaa = X or * as defined in Table 2
QEHLQRASPRLLQLLPPLPPPPPPPAFGGSLSSLGSRMSRQVVRSSKFRHVFGQPAKADQCYEDVRVSQTTWDSGFWCSVNPXVLWALICEASGGGAFLVLPLGKTGRVDKNAPTVRRXHSAPVLDIAWCPHNDNVIASGSEDCTVMVWEIPDGGLMLPLREPVVTLEGHTKRVGIVAWHTTAQNVLLSAGCDNVIMVWDVGPGAAMLTLGPEGPPDANYRGDWEPDGGLICTSCRDKRVRIIEPRKGTVVAEKDRPHEGTRPVRAVFVSEGKILTTGFSRMSERQVALWDTKHLEESPVSLRKLHTRNGVPVAFFGPDTNIVYLRGKGSGPIRVFEITSEAPFLHYLSMFSSKESQRGHGLHGPNRGLEVNKCEIAGFYKLHDGRCVSPMPKPVPRKSDLFQEDLGPTQPQGPDPCLHGLKEWLGGRDAGPLPSSPLKDGYVPPKSRELRVNRGLDPGRRRAAPEASGTPSSDAVSRLEEEMRKLQATVQELQKRLDRLEETVQAKL

SEQ ID NO: 10238 - protein, 47 aa, Homo sapiens
  misc_feature (1)...(47): Xaa = X or * as defined in Table 2
GMLFPKQITPQSIXVETNAKNVXGGDIASFMGSTHALFEFPDSHHSA

SEQ ID NO: 10239 - protein, 90 aa, Homo sapiens
  misc_feature (1)...(90): Xaa = X or * as defined in Table 2
RGGGAGPLTGHHVGLLGIAHAAADQFDRLAAGICGHSHPHPGLPGPLHCCAPLWSGPQQNXPTADVAESLQLVTVHQSETEDGEFTECNN

SEQ ID NO: 10240 - protein, 840 aa, Homo sapiens
  DOMAIN (262)..(295): Glycosyl transferase domain identified by eMATRIX, accession number PF00953C, p-value=8.773e-34, raw score of 19.70
  DOMAIN (177)..(301): Glycosyl transferase domain identified by PFam, accession name Glycos_transf_4, E-value=3.3e-05, PFam score of -2.1
MAAYLQWRRFVFFDKELVKEPLSNDGAAPGATPASGSAASKFLCLPPGITVCDSGRGSLVFGDILRLELSFPSRDPEEIERLLDYPAHMEGQIWFLPRSLQLTGFQAYKLRVTHLYQLKQHNILASVGEDEEGINPLVKIWNLEKRDGFTDGSVTLNKGDITRDRHSKTQILHKGNYPVTGLAFRQAGKTTHLFVVTTENVQHPVQSKTTFFHPLPKYPKQTLLQAPPNTLLLRHSVVPNGDCRDDHVFSLYFMIPFFFTTLGLLYHNWYPSRVFVGDTFCYFAGMTFAVVGILGHFSKTMLLFFMPQVFNFLYSLPQLLHIIPCPRHRIPRLNIKTGKLEMSYSKFKTKSLSFLGTFILKVAESLQLVTVHQSETEDGEFTECNNMTLINLLLKVLGPIHERNLTLLLLLLQVESVFETLVEDSAEEESTLTKLGNTISSLFGGGTTPDAKENGTDTVQEEEESPAEGSKDEPGEQVELKEEAEAPVEDGSQPPPPEPKGDATPEGEKATEKENGDKSEAQKPSEKAEAGPEGVAPAPEGEKKQKPARKRRMVEEIGVELVVLDLPDLPEDKLAQSVQKLQDLTLRDLEKQEREKAANSLEAFIFETQDKLYQPEYQEVSTEEQREEISGKLSAASTWLEDEGVGATTVMLKEKLAELRKLCQGLFFRVEERKKWPERLSALDNLLNHSSMFLKGARLIPEMDQIFTEVEMTTLEKVINETWAWKNATLAEQAKLPATEKPVLLSKDIEAKMMALDREVQYLLNKAKFTKPRPRPKDKNGTRAEPPLNASASDQGEKVIPPAGQTEDAEPISEPEKVETEPEQKEQSTGQKRPLKNDEL

SEQ ID NO: 10241 - protein, 650 aa, Homo sapiens
  DOMAIN (306)..(349): glpT family of transporters proteins domain identified by eMATRIX, accession number BL00942B, p-value=7.446e-16, raw score of 20.36
  DOMAIN (274)..(647): Sugar (and other) transporter domain identified by PFam, accession name sugar_tr, E-value=0.0061, PFam score of -110.3
MKKASSQEKDFRMPRGKKEPSYIVSGKDYPRVELDTHGCGLRCSALSDPSQDLQFIVAGDECVYLYQPDERGPCFAFEGHKLIAHWFRGYLIIVSRDRKVSPKSEFTSRDSQSSDKQILNIYDLCNKFIAYSTVFEDVVDVLAEWGSLYVLTRDGRMLFKKNLFEMAINLAKSQHLDSDGLAQIFMQYGDHLYSKGNHDGAVQQYIRTLGPLGASPGLMIVQKAAIKGAWEAGWRREQKKPNSADLGTVRAASRNCGQRLCVLAAQGYGYYRTVIFSAMFGGYSLYYFNRKTFSFVMPSLVEEIPLDKDDLGFITSSQSAAYAISKFVSGVLSDQMSARWLFSSGLLLVGLVNIFFAWSSTVPVFAALWFLNGLAQGLGWPPCGKVLRKWFEPSQFGTWWAILSTSMNLAGGLGPILATILAQSYSWRSTLALSGALCVVVSFLCLLLIHNEPADVGLRNLDPMPSEGKKGSLKEESTLQELLLSPYLWVLSTGSSYMSALEVGGLVGSIAAGYLSDRAMAKAGLSNYGNPRHGLLLFMMAGMTVSMYLFRVTVTSDSPKLWILVLGAVFGFSSYGPIALFGVIANESAPPNLCGTSHAIVGLMAKCTIAKHYSWSTAFWVAEVICAASTAAFFLLRNIRTKMGRVSQEG

SEQ ID NO: 10242 - protein, 306 aa, Homo sapiens
  DOMAIN (146)..(184): Zinc finger, C3HC4 type (RING finger) domain identified by PFam, accession name zf-C3HC4, E-value=0.00021, PFam score of 18.5
MGAVYQAAALSKAFKVKPFVVRDAVVYPILVEFTREVEEEPGIHSLKHNKRVLFSRMGPYPQRKVITFNRYSHDFNFHINYGDLGFLGPEDLRVFGSQNLTTVKLKGVGDSFKKYPDYESKGIKAHFNLDESGVLSLDRIFQKTKCSICNSALELPSVHFLCGHSFHQHCFESYSESDADCPTCLPENRKVMDMIRAQEQKRDLHDQFQHQLKCSNDSFSVIADYFGRAASPIIFMFVESVTQRTTYSQSNTLRCVNGSGPPEPGADPQSAEEQQLWRQPLSRRQLCPLTPGPGKALGPAATMAVE

SEQ ID NO: 10243 - protein, 808 aa, Homo sapiens
  DOMAIN (300)..(332): Cation-independent mannose-6-phosphate receptor repeat proteins domain identified by eMATRIX, accession number PF00878E, p -value=8.654e-09, raw score of 5.57
  DOMAIN (718)..(756): Zinc finger, C3HC4 type (RING finger) domain identified by PFam, accession name zf-C3HC4, E-value=0.00021, PFam score of 18.5
  misc_feature (1)...(808): Xaa = X or * as defined in Table 2
MVAIHSALESSLLFQEQSQLLYLVLTVHENLNFMAIGFTDGSVTLNKGDITRDRHSKTQILHKGNYPVTGLAFRQAGKTTHLFVVTTENVQDLQFIVAGDECVYLYQPDERDCRDDHVFSLYFMIPFFFTTLVIALPQLVPITGVCGRYLLLLCWQTFAVVGILGHFSKTMLLFFMPQVFNFLYSLPQLLHIIPCPRHRIPRLNIKTGKLEMSYSKFKTKSLSFLGTFILKVAESLQLVTVHQSETEDGEFTECNNMTLINLLLQSPWAHTXEKPHIAPAAAAAFSFLCDHWHPGRFLPSADYXLDFTYGFLQLATLSLSIPSLQPIGTIGKLEPSYVIRKFLDAQRIHNLTAYLQTLHRQSLANADHTTLLLNCYTKLKDSSKLEEFIKKKSESEVHFDVETAIKVLRQAGYYSHALYLAENHAHHEWYLKIQLEDIKNYQEALRYIGKLPFEQAESNMKRYGKILMHHIPEQTTQLLKGLCTDYRPSLEGRSDREAPGCRANSEEFIPIFANNPRELKAFLEHMSEVQPDSPQGIYDTLLELRLQNWAHEKDPQVKEKLHAEAISLLKSGRFCDVFDKAWFQQIMHYHMQHEQYRQVISVCERHGEQDPSLWEQALSYFARKEEDCKEYVAAVLKHIENKNLMPPLLVVQTLAHNSTATLSVIRDYLVQKLQKQSQQIAQDELRVRRYREETTRIRQEIQELKASPKIFQKTKCSICNSALELPSVHFLCGHSFHQHCFESYSESDADCPTCLPENRKVMDMIRAQEQKRDLHDQFQHQLKCSNDSFSVIADYFGRASPNFIFYVV

SEQ ID NO: 10244 - protein, 137 aa, Homo sapiens
MAAYLQWRRFVFFDKELVKEPLSNDGAAPGATPASGSAASKFLCLPPGITVCDSGRGSLVFGDILRLELSFPSRDPEEIERLLDYPAHMEGQIWFLPRSLQLTGFQAYKLRVTHLYQLKQHNILASVGEDEEGINPL

SEQ ID NO: 10245 - protein, 80 aa, Homo sapiens
VVHLAQDQGLVKDVAEATTLQQGNGLCVKLLFDLERKEGRAAGQKGKITRSLGTKPVNSFPQSIPSSQRTIEPRGKVLLV

SEQ ID NO: 10246 - protein, 392 aa, Homo sapiens
  DOMAIN (317)..(368): Porphobilinogen deaminase cofactor-binding site proteins domain identified by eMATRIX, accession number BL00533B, p-value= 1.000e-40, raw score of 22.89
  DOMAIN (254)..(383): Porphobilinogen deaminase domain identified by PFam, accession name Porphobil_deam, E-value=1.6e-64, PFam score of 227.7
MAWAGSEPRRVRRLGSTASEGEKQGVKEGPLPAAAAAAAAAAAAAAGYPGGGRSGRGEGSGRRRECAGRAPSERASPGRAGRVPEADRLTGKLGEAAGRGRTGQRRSPGHRLRAARVPTAPGKPRPGFCARLPRPYAGAGRGQAGAGSAEPLGLRPLLEKRGKERRGVGDPKIFQKTKCSICNSALELPSVHFLCGHSFHQHCFESYSESDADCPTCLPENRKVMDMIRAQEQKRDLHDQFQHQEENSPKMRVIRVGTRKSQLARIQTDSVVATLKASYPGLQFEIIAMSTTGDKILDTALSKGFTQALSVRQIGEKSLFTKELEHALEKNEVDLVVHSLKDLPTVLPPGFTIGAICKRENPHDAVVFHPKFVGKTLETLPEKRVGPPGTIS

SEQ ID NO: 10247 - protein, 112 aa, Homo sapiens
  misc_feature (1)...(112): Xaa = X or * as defined in Table 2
VPWEAGGSMSICFYPRQSEQSHNIVKSKRPVTFQQNRCQKGGGHSADVSSTCQCFQCSHREQGFAKPQFSYLXNGGSNSFYLTGCFDNLITSVFCSVRFIHGPKAIIKGKYH

SEQ ID NO: 10248 - protein, 164 aa, Homo sapiens
HSPSGGSRLGFGAELWAATSSGWNLWGCWGSEIRHPVAGVTRTKGFSSWYSSPAGALQWRRFVFFDKELVKEPLSNDGAAPGATPASGSAASKFLCLPPGITVCDSGRGSLVFGDILRLELSFPSPGSRRDRVRMKSVCRRGPCRAPLWFSWSSRVVLWSVSVW

SEQ ID NO: 10249 - protein, 118 aa, Homo sapiens
GGRRAEETWSRQTVPITGVCGRYLLLLCWHDLCRGGHLGTLQQDHATILHAPGVQLPLLTASAPAYHPLPSPPHTQTQYQDRQTGDELFQVQDQEPLFLGHLYFKGGREPPAGDSTPE

SEQ ID NO: 10250 - protein, 874 aa, Homo sapiens
  DOMAIN (339)..(359): PHAGE T4 LYSOZYME SIGNATURE domain identified by eMATRIX, accession number PR00684F, p-value=4.873e-09, raw score of 12.42
  DOMAIN (807)..(845): Zinc finger, C3HC4 type (RING finger) domain identified by PFam, accession name zf-C3HC4, E-value=0.00021, PFam score of 18.5
  misc_feature (1)...(874): Xaa = X or * as defined in Table 2
AMMGPLPGPHLLLDPLLPSSFCLPPGITVCDSCRGSLVFGDMEGQIWFLPRSLQLTGFQAYKLRVTHLYQLKQHNILASVGEDEEGINPLVKIWNLEKRDGGNPLCTRIFPAIPGTEPTVVSCLTVHENLNFMAIGFTDGSVTLNKGDITRDRHSKTQILHKGNYPVTGLAFRQAGKTTHLFVVTTENVQSYIVSGKDYPRVELDTHGCGLRCSALSDPSQDLQFIVAGDECVYLYQPDERGPCFAFEGHKLIAHWFRGYLIIVSRDRKVSPKSEFTSRDSQSSDKQILNIYDLCNKFIAYSTVFEDVVDVLAEWGSLYVLTRDGRVHALQEKDTQTKLEMLFKKNLFEMAINLAKSQHLDSDGLAQIFMQYGDHLYSKGNHDGAVQQYIRTIGKLEPSYVIRKFLDAQRIHNLTAYLQTLHRQSLANADHTTLLLNCYTKLKDSSKLEEFIKKKSESEVHFDVETAIKVLRQAGYYSHALDLAENHAHHEWYLKIQLEDIKNYQEALRYIGKLPFEQAESNMKRYGKILMHHIPEQTTQLLKGLCTXLSAQPRRPQRXGGPRLAGPTLRSFIPIFANKHPRDLKAFLEHMSEVQPDSPQGIYDTLLELRLQNWAHEKDPQVKEKLHAEAISLLKSGRFCDVFDKALDLCQMHDFQDGGLYLYEQGKLFQQIMHYHMQHEQYPAGQSACCERHGEQDPSLWEQALSYFARKKEDCKEYVAAVLKHIENGNLMPPLLVVQTLAHNSTATLSVIRDYLVQKLQKQSQQIAQDELRVRRYREETTRIRQEIQELKASPKIFQKTKCSICNSALELPSVHFLCGHSFHQHCFESYSESDADCPTCLPENRKVMDMIRAQGTEPRFSMINSQHQLQVLQ

SEQ ID NO: 10251 - protein, 227 aa, Homo sapiens
  DOMAIN (4)..(39): Ribosomal protein L15e proteins domain identified by eMATRIX, accession number BL01194A, p-value=7.632e-38, raw score of 18.70
  DOMAIN (4)..(227): Ribosomal L15 domain identified by PFam, accession name Ribosomal_L15e, E-value=5.4e-46, PFam score of 166.2
  misc_feature (1)...(227): Xaa = X or * as defined in Table 2
AKMGAYKYIQELWRKKQSDVMRFLLRVRCWQYRQLSALHRGSRPHRRPDKVHRLGYKQAKQGYVIYRIRVRRYIXDSCSRDRRGGRKRPVSKGATFGKPVHHGVNQAKVWFYPFTSVAEERPGRHCGALRVLNSYWVGEDSHLPNFLGVIPHGSHSHKAIRRNPXPPQWITQTQSHKHREMRGLTSARPERAVGLGKGHKFHHTIGGSRRAAWRRRNTLQAPPLPLI

SEQ ID NO: 10252 - protein, 111 aa, Homo sapiens
  DOMAIN (26)..(47): Myc-type 'helix-loop-helix' dimerization domain proteins. domain identified by eMATRIX, accession number BL00038B, p-value= 1.000e-14, raw score of 16.97
  DOMAIN (6)..(46): Helix-loop-helix DNA-binding domain identified by PFam, accession name HLH, E-value=0.033, PFam score of 14.9
DPMSLLYNMNDCYSKLKELVPSIPQNKKVSKMEILQHVIDYILDLQIALDSHPTIVSLHHQRPGQNQASRTPLTTLNTDISILSLQVRPAPGSPPRRRTLPRSSGLSLGDP

SEQ ID NO: 10253 - protein, 510 aa, Homo sapiens
  DOMAIN (232)..(253): Myc-type 'helix-loop-helix' dimerization domain proteins. domain identified by eMATRIX, accession number BL00038B, p-value= 1.000e-14, raw score of 16.97
  DOMAIN (212)..(252): Helix-loop-helix DNA-binding domain identified by PFam, accession name HLH, E-value=0.033, PFam score of 14.9
MAVGKTGYNHSTCSDKYRPSSFIKSSLLDNEKSNRSFQLTLGKGCREKKSSFQGLPFFCVYMSFRGTVVTSKLGSRPAHPAGIGCERGRTKPTPRARAHQWKRPLVLIDVPPSANGDEGKLQRVAPASADKSRPAGLGLHSEPSPVPSAASSAGGSGGLSFRAASSLPVSPSLAVSMKAFSPVRSVRKNSLSDHSLGISRSKTPVDDPMSLLYNMNDCYSKLKELVPSIPQNKKVSKMEILQHVIDYILDLQIALDSHPTIVSLHHQRPGQNQASRTPLTTLNTDISILSLQRGAVVWLIIIPGGSPEGRRGVFPVAGYPRTWPPGPRHLSPAAAPADLCAAGREARSGPNPTPASPPGEAQTPAARSPPSHGDPRVVRSDGPGERPRTEAVRAGLWGRPGPFRAPAGHRWRRWPRDPWSRSRGAAAPLGGDFPRRQPRCPTPAVEPGRHLLADTRTAALARGLVGLGPGHWEPEEQSVGWRRSREKTPGSEDTEDAWEKELAGGPCEGV

SEQ ID NO: 10254 - protein, 181 aa, Homo sapiens
  misc_feature (1)...(181): Xaa = X or * as defined in Table 2
ILSQVRCQAQLAQQAAGGGLSFRAASSLPVSPSLAVSMKAFSPVRSIRKNSALSDHSLGISRSKTPVDDPDGALLYNMKDCYSKLKELVPSIPPEQRRXARWEILQHVIRLTSWDLADSPWDLAFPLIVQPGIHQRTRGRNQRSRTPLGPPSTRDISILSFAGLLEFPSELMSNDSKALCG

SEQ ID NO: 10255 - protein, 82 aa, Homo sapiens
NNGGGGGFGVGSGSNFGGGGSNNDFGNYNNQSSNFGPMKGGNFGGRSSGPYGGGGQYFAKPRNQGGYGGSSSSSSYGSGRRF

SEQ ID NO: 10256 - protein, 558 aa, Homo sapiens
  DOMAIN (426)..(471): kw TRANSCRIPTASE REVERSE II ORF2 domain identified by eMATRIX, accession number DM01354N, p-value=6.550e-34, raw score of 13.17
  DOMAIN (62)..(132): RNA recognition motif. domain identified by PFam, accession name rrm, E-value=1.4e-23, PFam score of 91.8
MRDPNTKRSRGFGFVTYATVEEVDAAMNTTPHKVDGRVVEPKRAVSREDSQRPGAHLTVKKIFVGGIKEDTEEHHLRDYFEQYGKIEVIEIMTDRGSGKKRGFAFVTFDDHDSVDKIVIQKYHTVKGHNCEVRKALPKQEMASASSSQRGRRGSGNFGGGRGDGFGGNDNFGRGGNFSGRGGFGGSCGGGGYGGSGDGYNGFGNDGSNFGGGGSYSDFGNYNNQSSNFGPMKGGNFGGRSSGPYGGGGQYFAKPQNQAARCVAARWLFRTEARLVFLQKFPPWAVVEVVTVIVAAPAAATATTRDGGGCSRNCNIPEVFPELLGCPNRRGPPGGVREKQQQTNSKSTRRQEITKTIAELKEIETRKTLQKINESRSWFYEKINKVDRLLDRLIKKKREKSQIDAIKNDIGDIVTDPAEIQTTIKEYYKRLYANELENLEEMDKFLATYSLHSLNQEEVESLNKPVTSSEVEAVTNSLPTKKSPGPDGFTVLLEVLAPAIRQEKEIKHIPIGREEVKLSLFADDVIVYLENPIVSAQNLLKLISNFSKLSGYKINVQKS

SEQ ID NO: 10257 - protein, 92 aa, Homo sapiens
  misc_feature (1)...(92): Xaa = X or * as defined in Table 2
GKEKLSHSKAWAPKSQNSNSSASSWSNQSQAQPRFKGEDIESHLLMGREALSXIQSGRLVYLQSLSXTXRFSTASPEQLDTECRLVHSQTLS

SEQ ID NO: 10258 - protein, 216 aa, Homo sapiens
  DOMAIN (54)..(73): Eukaryotic  RNA-binding region RNP-1 proteins domain identified by eMATRIX, accession number BL00030A, p-value=1.000e- 12, raw score of 14.39
  DOMAIN (54)..(117): RNA recognition motif. domain identified by PFam, accession name rrm, E-value=1.7e-06, PFam score of 35.0
MSLRKLTIMVEGKGGPNIPHACGCRQRSSIKVSLLPAVTSKSESPKEPEQLRKLFIGGLSFETTDESLRSHFEQRRTLTDCAVMRDPNTKCSKGFGFVTYATMEEKYHTVNGHSCEARKALSKQEVASASSSQRGRSGSGNFGGGHGGGFGGNDNFGHGENFRGHSSFGGSHGGSGYGGSGDDYSGFGNDGSNFGGGGSYNDFGNYSNQSSNFGPM

SEQ ID NO: 10259 - protein, 506 aa, Homo sapiens
  DOMAIN (11)..(30): Eukaryotic  RNA-binding region RNP-1 proteins domain identified by eMATRIX, accession number BL00030A, p-value=1.000e- 12, raw score of 14.39
  DOMAIN (11)..(330): RNA recognition motif. domain identified by PFam, accession name rrm, E-value=1.3e-06, PFam score of 35.4
  misc_feature (1)...(506): Xaa = X or * as defined in Table 2
SPKEPEQLRKLFIGGLSFETTDESLRSHFEQWGTLTDCVVRFGRDKAVKQPISLAYLGAVFSECLXKXLIALXLELCWQRNVLLXFXKLTSXIXGXWETGRTFYKRLVXSFLLPYSKLKXQKLLRSDFVLHKLTLFSGMRDPNTKRSRGFGFVTYATVEEVDAAMNARPHKVDGRVVEPKRAVSREVSGFFFFFFLNLLGYVLLXTXDSGVFXTYQNFLFEYRLCXSKPMVFLLLDSQRPGAHLTVKKIYVGGIKEDTEEHHLRDYFEQYGKIEVVEIHXLDRGQWPRKRGFAFVTFDDHDSVDKIVSKYQIVAFSKGSTICMAFXTLIPCCIYVFFLVQKYHTVNGHNCEVRKALSKQEMASASSSQRGYACCLIKPXRXLXVTPVXMIXCLNFMSXGRSGSGNFGGGRGGGFGGNDNFGRGGNFSGRGYVWFIYMXFXLLTIFAMKILQYGNCIQNVTLSPSHTXNLKLFLTGGFGGSRGGGGYGGSGDGYNGFGNDGKFFRNK

SEQ ID NO: 10260 - protein, 36 aa, Homo sapiens
  misc_feature (1)...(36): Xaa = X or * as defined in Table 2
MIXXXXXXXXXXXXXXXXXXVSPSAFAPXXXXKSLG

SEQ ID NO: 10261 - protein, 30 aa, Homo sapiens
LLTNCSISCDPPASASQSAGITGVSHSARP

SEQ ID NO: 10262 - protein, 109 aa, Homo sapiens
  misc_feature (1)...(109): Xaa = X or * as defined in Table 2
SPVQLXFXLFLVFCXLWSWSAVVYLGPLGTPSADAHTAGLSKTPPHWAARARLDDVFSLRTFSSHSLNMELVQDLTASAPMYSSTSRDPPCLGLPKCWDYKREPPRPAH

SEQ ID NO: 10263 - protein, 47 aa, Homo sapiens
  misc_feature (1)...(47): Xaa = X or * as defined in Table 2
TPASLKIPVEXXNTLLAKMVSISXPRDLPASASQSAGITGVSHRARC

SEQ ID NO: 10264 - protein, 71 aa, Homo sapiens
DKTSRGTIRQQHSRFTKIRCSAATAADTQANRVWSGPLANSNRPAAEGPRDPPASASQSAGITGVSHRAWP

SEQ ID NO: 10265 - protein, 329 aa, Homo sapiens
  misc_feature (1)...(329): Xaa = X or * as defined in Table 2
KYPPPAVLWFFGFFVLRRSLALSPRLECSGMISAHCKLCLPGSRHSPASASRVAGTTDVHHHAQLILYVFLVETGFHRVSQDGLNLLTRLHLPKCWDYRRXATTPGLCFVFXKKRNAREGGRQPPDHKSXFLVFFFLFFLKWSLDSVSKAGVQWHGLSSLQAPPRGFTPFSCLSLPSSWDYRRPLPRPANFFVFLXXDGGFTVLARMVLISXPRDLPASASQRAGITGLSHCAWSEFFCFFKTGSHSVTHARVQRHNLDSSLEAXTPGLNXSSRLSLPSSWDYRSTPPSPANFCSFSRDGVSPCXPGWSRSSDLVIRPPRPPKVPGLQA

SEQ ID NO: 10266 - protein, 202 aa, Homo sapiens
  misc_feature (1)...(202): Xaa = X or * as defined in Table 2
RDSPPRSLDSGARRDAPPHSPPAECRAHAATWRLKPRPHRPHSLTAPLPVHWAGTTEPLPSPRPATGTRERPPLHFPATPRSHSWRLARPCRQPGPSXDRLFSAGAGPGVVSCLDREEKNAGHWLSSAFALVWLWLTEHWLLLVGFIGYVKAGSVPYPGCRACFFWAVLAGLGCLPAVSGIPRERFWVFPRLHLVPWLALWE

SEQ ID NO: 10267 - protein, 107 aa, Homo sapiens
VFRTSAIKMGRIFLDHIGGTRLFSCANCDTILTNRSELISTRFTGATGRAFLFNKVVNLQYSEVQDRVMLTGRHMVRDVSCKNCNSKLGWIYEFATEDSQRYKEGRV

SEQ ID NO: 10268 - protein, 94 aa, Homo sapiens
GLRLCLSRPLTRPGDDSVGGSAMASGAGGVGGGGGGKIRTRRCHQGPIKPYQQGRQQHQVWDPDAAVAWRVGKLGWRGRAVRGPGAPRGADRRA

SEQ ID NO: 10269 - protein, 126 aa, Homo sapiens
  misc_feature (1)...(126): Xaa = X or * as defined in Table 2
MGRIFLDHIGGTRLFSCANCDTILTNRSELISTRFTGATGRAFLFNKVVNLQYSEVQDRVMLTGRHMVRDVSCKNCNSKLGWIYGVWPLKDSQRFXGKGRRXSGERVLVSEEELRALEEHVPPDNS

SEQ ID NO: 10270 - protein, 71 aa, Homo sapiens
  misc_feature (1)...(71): Xaa = X or * as defined in Table 2
KNSYKCEECGKIFNEYSHLIARKRIYTXEKLYQYKDCEKAINVCSHLTQHQRVHXKKYYKFNYCQKVFQKI

SEQ ID NO: 10271 - protein, 40 aa, Homo sapiens
  misc_feature (1)...(40): Xaa = X or * as defined in Table 2
VHLLNPQHMPLPSTHKQRRTTLXKGHAEHLQYYLNNQKLS

SEQ ID NO: 10272 - protein, 210 aa, Homo sapiens
  misc_feature (1)...(210): Xaa = X or * as defined in Table 2
WVWESLNREDLWPCFLRRILGGSSYSTAEMVSGQTLQRAHLREAASISLNSQGVWRKSARFSHQLERGTEEQQLQIPDLGQHPSSKAPVFPQVQAHPRFQTGPHGHKLQRNQDPGQLQXIPMLGQTPWTQATGPTIXTQPSGRSPCSHYSGMSTDSGFMLAHSLTQVSSQPTCRLLLEACPWTSSGGLPRISGWTDRQVFGSVDRDLISP

SEQ ID NO: 10273 - protein, 63 aa, Homo sapiens
  misc_feature (1)...(63): Xaa = X or * as defined in Table 2
GKFFSLCETLFPSGVGSFFSSCTMDSSRSLGVGSKNSHFSLAXNTDLRLSLCPFPGWKEDIKF

SEQ ID NO: 10274 - protein, 664 aa, Homo sapiens
  misc_feature (1)...(664): Xaa = X or * as defined in Table 2
FMFINMSVCRLITTKYLLLLFLHESLILLSENLRKDVEAVTGSPASQTSICIGILLRSAELALLLHPVDQANTLKSPVSESVSPVVPDYLPTENGDFLSSKRKQISRDINRIRSVTVNHMSDNRSMSVDLSHIPLKDPLLFKSASDTNLAKRAFPFMDYLSDKHLGKISEDESSGLVYKSGSGEIGSETSDKKDSFYTDSSSILNYREGFRIYLSFGXVMGNQNILSSTLTSKGNETIESIFKAEDLLPEAASLSENLDISKEETPPVRTLKSQSSLSGESLRERLPHPNLGFPLVFSYKNMKRSSSQMSFEATISLDSMILEEQLLESDGSDSHMFLEKGNRKNSTTNYRGTAESVNAGANLQNYGETSPDAISTNSEGAQENHDDLMSVVVFKITGVNGEIDIRGEDTEICLQVNQVTPDQLGNISLRHYLCNRPVGSDQKAVIHSKSSPEISLRFESGPGAVIHSLLAEKNGFLQCHIENFSTGFLTSSLMNIQHFLEDETVATVMPMKIQVSNTKINLKDDSPRSSTVSLEPAPVTVHIDHLVVERSDDGSFHIRDSHMLNTGNDLKENVKSDSVLLTSGKYDLKKQRSVTQATQTSPGVPWPSQSANFPEFSFGLHLGEQLMEENESLKQELAKAKMALAEAHLEKDALLHHIKKMTVE

SEQ ID NO: 10275 - protein, 77 aa, Homo sapiens
  misc_feature (1)...(77): Xaa = X or * as defined in Table 2
ARHCGSCPXSQHFGRSRXAEHLRTGVXDQPAQRGETPSLWKNTKIRRAQWWCPPVIPATSGGLRQENYLNPGRQRLQ

SEQ ID NO: 10276 - protein, 59 aa, Homo sapiens
TYSECEDGTYSPEISWHHRKGTKGSEDSPPKHAGNNESHSSRRRNRHSKSKVTNGVGKK

SEQ ID NO: 10277 - protein, 659 aa, Homo sapiens
  misc_feature (1)...(659): Xaa = X or * as defined in Table 2
FRLVTPGVPAFSGCGRRHRGRTGRRAMASCVGSRTLSKDDVNYKMHFRMINEQQVEDITIDFFYRPHTITLLSFTIDSLMYFAFTTDDSVPXDNIWRGILSGILLFLIIKVXAFPNGPLTRPHPALWRMVFGLSELYFLFLVFLLFPEFEQAKSLMDWLDPNLRYATREANVMEYAVNCHVITWERIISHFDIFAFGHFWGWAMKALLIRRYGLCWTISITWELTELFFMHLLPNFAECWWDQVILDILLCNGGGIWLGMVACRFLERRTDHWASFKDIHTTTGKIKRAVLQFTPASWTYVRWFDPKSSFQRVAGVYLFMIIWQLTELNTFFLKHIFVFQASHPLSWGRILFIGGINSFPQLRQYYAYLTDTQCKRLXGTQCWVFGVIGFLAAIVCIKFGQDLFSKTQILYVVLWLLCVAFTTFLCLYGMIWYAEHYGHPRKRPTPECEDGTYSPEISWDHRKGTKGSEDSPPKHAGNNESHSSRRRNRHSKSKVTNGRWERNEKPWVNSKMFPECLGTEEGKWELHLGTPRGGGSRAHRGKPGRGEGTLGVIILRSLSLCFPTDLGRVQADHRLGGPFANVGSLLTSALDMRSPVAARCVERETVAISFHSCQEQLRAMLDRGCSVNIFPSDEALTPWLMDWSPVFNFIFYESTFPID

SEQ ID NO: 10278 - protein, 43 aa, Homo sapiens
MKMDTRIQEQVSSKSSLYSCFLSQPHTNRENTLCLCLLWMALC

SEQ ID NO: 10279 - protein, 202 aa, Homo sapiens
  DOMAIN (128)..(150): KINESIN HEAVY CHAIN SIGNATURE domain identified by eMATRIX, accession number PR00380A, p-value=9.250e-25, raw score of 14.18
  DOMAIN (46)..(202): Kinesin motor domain identified by PFam, accession name kinesin, E-value=5e-51, PFam score of 182.9
GRARGARGCSGGGAAREGPPKAERCAASGRASAANMSDTKVKVAVRVRPMNRRELELNTKCVVEMEGNQTVLHPPPSNTKQGERKPPKVFAFDYCFWSMDESNTTKYAGQEVVFKCLGEGILEKAFQGYNACIFAYGQTGSGKSFSMMGHAEQLGLIPRLCCALFKRISLEQNESQTFKVEVSYMEIYNEKVRDLLDPTGSR

SEQ ID NO: 10280 - protein, 111 aa, Homo sapiens
  misc_feature (1)...(111): Xaa = X or * as defined in Table 2
FFPKALIFCREVGPISPPPKIRFPSPKFPGNRFSPPRVVKPPPGPSPFKRPPIRKKILPCQPPXTLAPPRILXKGPPPSSSSGXNPYYLFIQQKTEYLLWSRPCPWHCEQR

SEQ ID NO: 10281 - protein, 376 aa, Homo sapiens
  DOMAIN (98)..(126): Dehydrins proteins domain identified by eMATRIX, accession number BL00315A, p-value=1.672e-09, raw score of 9.35
PLLPTSLSVEDAAILLQQVMRAFSKQASTVVFSDTVVVSEKFINDCTELFRELMHQKAEKEMKNNPVHLITEEDLKQISTLESVSTSKKDKKDERRRKATEGSGSMRGGGGGNAREYKIKKVKKKGRKDDDSDDESQSSHTENEESGYDKKDENILEDVKWGKTSQFLEIFQDIEKARDKTLEADSELESVFMSSTTSASGTGRKRTIKDLQEEVSNLYNNIRLFEKGMKFFADDTQAALTKHLLKSVCTDITNLIFNFLASDLMMAVDDPAAITSEIRKKILSKLSEETKVALTKLHNSLNEKDQHALLVKYQGLVVKQLVSQSKKTGQGDYPLNNELDKEQEDVASTTRKELQELSSSIKDLVLKSRKSSVTEE

SEQ ID NO: 10282 - protein, 814 aa, Homo sapiens
  DOMAIN (438)..(466): Dehydrins proteins domain identified by eMATRIX, accession number BL00315A, p-value=1.672e-09, raw score of 9.35
  misc_feature (1)...(814): Xaa = X or * as defined in Table 2
RVCSSSASTASQAVMADAWEEIRRLAADFQRAQFAEATQRLSERNCIEIVNRLIAQKQLEVVHTLDGKEYITPAQISKEMRDELHVRGGRVNIVDLQQVINVDLIHIENRIGDIIKSEKHVQLVLGQLIDENYLDRVGQEVNDKLQESGQVTISELCKTYDLPGNFLTQALTQRLAIIIIGHIDLDNRGVIFTEAFVARHRARIRGLFSAITRPTAVNSLISKYGFQEQLLYSVLDELVNSGRLRGTVVGGRQDKAVFVPDIYSRTQSTWVDSFFRQNGYLEFDALSRLGIPDAVSYIKKRYKTTQLLFLKAACVGQGLVDQVEASVEEAISSGTWVDIAPLLPTSLSVEDAAILLQQVMRAFSKQASTVVFSDTVVVSEKFINDCTELFRELMHQKAEKEMKNNPVHLITEEDLKQISTLESVSTSKKDKKDERRRKATEGSGSMRGGGGGNAREYKIKKVKKKGRKDDDSDDESQSSHTGKKKPEISFMFQDEIEDFLRKHIQDAPEEFISELAEYLIKPLNKTYLEVVRSVFMSSTTSASGTGRKRTIKDLQEEVSNLYNNIRLFGKRGWKFFADDTQGWLLPKHLLEVQCVLISLNLIFNFLGFGILMDGQXDDPGRPFTSELRKEILSKLSEETKVALTKLHNSLNEKSIEDFIFCLDSAAEACDIMVKRGDKKRERQILFQHRQALAEQLKVTEDPALILHLTSVLLFQFSTHSMLHAPGRCVPQIIAFLNSKIPEDQHALLVKYQGLVVKQLVSPSKKTGQGDYPLNNELDKEQEDVASTTRKELQELSSSIKDLVLKSRKSSVTEE

SEQ ID NO: 10283 - protein, 130 aa, Homo sapiens
  DOMAIN (100)..(118): Immunoglobulins and major histocompatibility complex proteins domain identified by eMATRIX, accession number BL00290B, p-value= 1.409e-10, raw score of 13.17
  DOMAIN (42)..(106): Immunoglobulin domain identified by PFam, accession name ig, E-value=0.0063, PFam score of 14.5
  misc_feature (1)...(130): Xaa = X or * as defined in Table 2
IPSEISRSVAFSLLPLLSVSGLEAIQRTPKNQVYSRHPPENGKSKFLNCYVSGFHPSDIVGDLLMNGERIEXAXHSDLAFRKDWAFYLLDYTEFTPTEKDEYACRVNHVTLSQPKICKWDRDMLSASMEA

SEQ ID NO: 10284 - protein, 133 aa, Homo sapiens
  DOMAIN (56)..(79): Immunoglobulins and major histocompatibility complex proteins domain identified by eMATRIX, accession number BL00290A, p-value= 7.158e-13, raw score of 20.89
  DOMAIN (52)..(119): Immunoglobulin domain identified by PFam, accession name ig, E-value=0.085, PFam score of 10.8
RPRVRPRVRSIRAEMSRSVALAVLALLSLSGLEAIQRTPKIQVYSRHPAENGKSNFLNCYVSGFHPSDIEVDLLKNGERIEKVEHSDLSFSKDWAFYLLYYTEFTPTEKDEYACRVNHVTLSQPKIVKWDRDM

SEQ ID NO: 10285 - protein, 91 aa, Homo sapiens
  DOMAIN (42)..(57): G-PROTEIN BETA WD-40 REPEAT SIGNATURE domain identified by eMATRIX, accession number PR00320C, p-value=4.960e-10, raw score of 13.01
  DOMAIN (17)..(55): WD domain, G-beta repeat domain identified by PFam, accession name WD40, E-value=0.00019, PFam score of 28.2
VVEFTTAVVSGTVKQSGEVLVNVKEHSRQINDIQLSRDMTMFVTASKDNTAKLFDSTTLEHQKTFRTERPVNSAALSPNYDHVREPHLPSC

SEQ ID NO: 10286 - protein, 158 aa, Homo sapiens
  DOMAIN (74)..(85): Trp-Asp (WD) repeat proteins proteins domain identified by eMATRIX, accession number BL00678, p-value=7.158e-09, raw score of 9.67
  DOMAIN (5)..(85): WD domain, G-beta repeat domain identified by PFam, accession name WD40, E-value=4.3e-13, PFam score of 56.9
RVTAGMKPILLQGHERSITQIKYNREGDLLFTVAKDPIVNVWYSVNGERLGTYMGHTGAVWCVDADWDTKHVLTGSADNSCRLWDCETDNNEPYMKIPCNDSKITSAVWGPLGECIIAGHESGELNQYSAKSGEVLVNVKEHSRQINDIQLSRDMTMF

SEQ ID NO: 10287 - protein, 28 aa, Homo sapiens
  misc_feature (1)...(28): Xaa = X or * as defined in Table 2
XPSLEDLSNSIQKLHLAENAEPEEQSAA

SEQ ID NO: 10288 - protein, 249 aa, Homo sapiens
AQQAVLARSKLESLCRELHGHNRSLKEEGVQRAREEEEKRKEVTSHFQVTLNDIQLQMEQHNERNSKLRQENMELAERLKKLIEQYELREEHIDKVFKHKDLQQQLVDAKLQQAQEMLKEAEERHQREKDFLLKEAVESQRMCELMKQQETHLKQQLALYTEKFEEFQNTLSKSSEVFTTFKQEMEKMTKKIKKLEKETTMYRSRWESSNKALLEMAEEKTVRDERTGGPAGKNPTAGEAVPGTADRAQ

SEQ ID NO: 10289 - protein, 837 aa, Homo sapiens
MEPELLVRKVSALQALGRGFLVRRQFQSVRAEYEAIVRKVEGDLGTLQWTEGRIPRPRFLPEKAKSHQTWKAGDRVANPEQGLWNHFPCEESEGEATWEEMVLKKSGESSANQGSLCRDHSSWLQMKQNRKPSQEKTRDTTRMENPDRGFVPGKECSFEQLEHVREMQEKLARLHFSLDVCGEEEDDEEEEDGVTEGLPEEQKKTMADRNLDQLLSNVGSCLGALVPGGMRGGEGEGTKPVQDGRPGWEEGLVQSATILDGHSQKLHLAENAEPEEQSAAWPQTLSRTVPSQDPPVDAKKPILLQGHERSITQIKYNREGDLLFTVAKDPSGPLVIEKVRNYSLPLWSVLSVGSTQEEALSRCPQEQCPWLPTSAKRPNPRKPLLPGDGEGLMPSQRPMDDKKKKRSPKPCLAQPAQAPGTLRRVPVPTSHSGSLALGLPHLPSPKQRAKFKRASPAGELHAPGGGLWGLGAKHGQLAESAGRLPLTVTCKAGTEHHLPGSPGHGELFDSTTLEHQKTFRTERPVNSAALSPNYDHVVLGGGQEAMDVTTTSTRIGKFEARRKALQDAVNALCATSPPGSQRCPPPITRNGKQLALLKTNSAVRTCGFDFGGNIIMFSTDKQMGYQCFVSFFDLRDPSQIDNNEPYMKIPCNDSKITSAVWGPLGECIIAGHESGELNQYSAKAVGEEDEEDEEGESLDSVKALTAKLQLQTRRPSYLEWTAQVQSQAWRRAQAKPGPGGPGDICGFDSMDSALEWLRRELREMQAQDRQLAGQLLRLRAQLHRLKMDQACHLHQELLDEAELELELEPGAGLALAPLLRHLGLTRMNISARRFTLC

SEQ ID NO: 10290 - protein, 315 aa, Homo sapiens
MGSCAARASLTSTTPCSTAPSPINHPKAEECERTTAQDWQAAPPAAPVRDPLGEPSWAPESGGDVESLYIYLRDCKYTNQHPVFSSRFVNPPIDTLYLAALVGPWKTFMSSSGIVNTPIGTLYLAQVTVPPPLHTRFFALSPRQPRSFKNGLLFQTGTTLNPLSGYSSDYKGFGRFRNHPQTGFSPAGANQRGPLVATLSGPGGEGQSAVPVSLVKRKTTLAPNTQTASPRALADSLMQLARQVSPTGKRAVSATAINLKVCKHTSQHPVFSSRFVSAPIDTLYLAALVRTWRVFMSSSGIVNTPIGTLYLAQGL

SEQ ID NO: 10291 - protein, 142 aa, Homo sapiens
  misc_feature (1)...(142): Xaa = X or * as defined in Table 2
GRGHLGGVWCXRSQERAQQIKEASAEITCSWLQMKQNRKPSQEKTRDTTRMENPDRGFVPGKECSFEQLEHVREMQEKLARLHFSLDVCGEEEDDEEEEDGVTEGLPEEQKKTMADRNLDQLLSNVGSCLGALVPGGMRGGE

SEQ ID NO: 10292 - protein, 116 aa, Homo sapiens
FFAFFLGLIPFNAPLPHSTWGAAEHPPESVKSHSLKRMRGAVWCLRGTPTQRHCSSGSAFSARCSFWIELLRSSRLLSSWSRLRSAIVFFCSSGKPLSDPNPLPLHRPPPPHTHPG

SEQ ID NO: 10293 - protein, 1104 aa, Homo sapiens
  DOMAIN (821)..(848): PROTEIN PHOSPHATASE PP2A 55KD REGULATORY SUBUNIT SIGNATURE domain identified by eMATRIX, accession number PR00600J, p-value= 5.207e-09, raw score of 12.56
  DOMAIN (63)..(83): IQ calmodulin-binding motif domain identified by PFam, accession name IQ, E-value=0.04, PFam score of 20.5
  misc_feature (1)...(1104): Xaa = X or * as defined in Table 2
PGCNFSLDVCREEEDDEEEEDGVTEGLPEEQKKTMADRNLDQLLSNARGRAWQLAPMEPELLVRKVSALQACVRGFLVRRQFQSLRAEYEAIVREVEGDLGTLQWTEGRIPRPRFLPEKAKSHQTWKAGDRVANPEQGLWNHFPCEESEGEATWEEMVLKKSGESSANQGSLCRDHSSWLQMKQNRKPSQEKTRDTTRMENPEATDQRLPHSQPQLQELQYHRSHLAMELLWLQQAINSRKEYLLLKQTLRSPEAGPIREEPRVFLEHGEQACERDQSQPSAPLEDQSYKRQDHWRARTGGMTPVTGVKSPHRFPGSFGHYTKKHLLGAKFREPCYSKSGPPSSIPSNSQALGDRLTKGPDDGRQTFGGTCLLQMKILEDQTPRGLKPRNHCPRKSRTQLSALYEDSNIKEMSPRKLDHKEPDCRTVRTQELGLSEDHIIWDGGSPAAKRVVVYRNGDPFFPGSQLVVTQRRFPTMEAFLCEVTSAVQAPLAVRALYTPCHGHPVTNLADLKNRGQYVAAGFERFHKLHVFRNGDLVSPPFSLKLSQAASQDWETVLKLLTEKVKLQSGAVCKLCTLEGLPLSAGKELVTGHYYVAVGEDEFKDLPYLELLVPSPSLPRGCWYAQGHRAQVTQPSPKEPDRIKPSAFYARPQQTIQPRSKLPTLSFPSGVIGVYGAPHRRKETAGALEVADDEDTQTEEPLDQTVQGKGTLMATRKQNSCRGKGRMGKGRVLTHSGEMGSGKELTQVASNTKQNSSKPGPTCRCQGEVIEKGSTLVEEKGHQKPILLQGHERSITQIKYNREGDLLFTVAKDPRTRARVNFVIFLNNSSGDTKHVLTGSADNSCRLWDCETGKQLALLKTNSAVRTCGFGLWGATFIMFSNGQSRWGYQCFVELFWTWRDSEARFDNNEALHGRFPCNDSKITSAVWGPLGECIIAGPWRVGELNQYSAKSGEVLVNVKEHSRQINDIPVYSRDMTMFVTASKDNTAKLFDSTTLEHQKTFRTERPVNSAALSPNXXQRWFWAGGQEAMDVXPTTLHPGLGKFEARFLSIWPFEEEFGRVKGHFGPINSVAFHPDGKSYSSGGEDGYTSPIHYFRPHQYFEFEV

SEQ ID NO: 10294 - protein, 101 aa, Homo sapiens
  misc_feature (1)...(101): Xaa = X or * as defined in Table 2
LGTRPAHRSSQXGKGSPLPPGAPLISRGAGKEGGPGDRAAHADFLPAEEGAHGMRGSHGSPLIAPLPTYPHPPSGLFPLGALPLARPRHQGAALGSVHEIQ

SEQ ID NO: 10295 - protein, 1475 aa, Homo sapiens [sequence omitted]

SEQ ID NO: 10296 - protein, 106 aa, Homo sapiens
  DOMAIN (24)..(52): !!!! PROTEIN ALU SUBFAMILY WARNING ENTRY NUCLEAR PHOSPHO domain identified by eMATRIX, accession number PD02454B, p-value= 3.805e-14, raw score of 11.61
  misc_feature (1)...(106): Xaa = X or * as defined in Table 2
YGLGAVAHACNPSTLGGQAGQITRLAVQDQPDQHCETPSLIKMQKNLPGHGGVCLQSQLLRGLRQGNCLNQGGGSCSEPRSHQCTPAWAIEXESVSKKKKKKKLVV

SEQ ID NO: 10297 - protein, 686 aa, Homo sapiens
  DOMAIN (40)..(79): PROTEIN ZINC FINGER ZINC-FINGER METAL-BINDING NU domain identified by eMATRIX, accession number PD01066, p-value=4.789e-24, raw score of 19.43
  DOMAIN (156)..(610): Zinc finger, C2H2 type domain identified by PFam, accession name zf-C2H2, E-value=6.7e-83, PFam score of 288.8
  misc_feature (1)...(686): Xaa = X or * as defined in Table 2
MGAVRDELHSLVVPPLMGRGAQTPMAAAALRDPAQGCVTFEDVTIYFSQEEWVLLDEAQRLLYCDVMLENFALIASLGLISFRSHIVSQLEMGKEPWVPDSVDMTSAMARGAYGRPGSDFCHGTEGKDLPSEHNVSVEGVAQDRSPEATLCPQKTCPCDICGLRLKDILHLAEHQTTHPRQKPFVCEAYVKGSEFSANLPRKQVQQNVHNPIRTEEGQASPVKTCRDHTSDQLSTCREGGKDFVATAGFLQCEVTPSDGEPHEATEGVVDFHIALRHNKCCESGDAFNNKSTLVQHQRIHSRERPYECSKCGIFFTYAADLTQHQKVHNKENPYECFEGGKFFKPALSLVKHRRVHTGESPHVCGDCGKFFSRSSNLIQHKRVHTGEKPYECSDCGKFFSQRSNLIHHKRVHTGRSAHECSECGKSFNCNSSLIKHWRVHTGERPYKCNECGKFFSHIASLIQHQIVHTGERPHGCGECGKAFSRSSDLMKHQRVHTGERPYECNECGKLFSQSSSLNSHRRLHTGERPYQCSECGKFFNQSSSLNNHRRLHTGERPYECSECGKTFRQRSNLRQHLKVHKPDRPYECSECGKAFNQRPTLIRHQKIHIRERSMENVLLPCSQHTPEISLRTDLIRALSSTMLNLVHPSTHTGEVPXECXLCWKLSGDKLHSLTVEFISVFSLLGL

SEQ ID NO: 10298 - protein, 212 aa, Homo sapiens
  misc_feature (1)...(212): Xaa = X or * as defined in Table 2
QRVQRSLKKXCWGFNWGHSGGKIXKQIGPYLNTGTRLKSKWIIVPQNCIISRRQQGKRVHLGLGKDFLNPTPKAQSMRGKIDKLYFIKIENFSLKGTIRRTKRQAVEWQKIYLQNISDKXVASRLHKEVSKLNKVKPIVDLMRCFRPELAASGPCSLSFSICFQHXIQNVLLEIQVRSHQPSELSNRRPWHSKVHNSLQCWAKHEAPLFSLL

SEQ ID NO: 10299 - protein, 104 aa, Homo sapiens
  misc_feature (1)...(104): Xaa = X or * as defined in Table 2
VSSTVFGNTVRNKTEDDSGGNWEPPRTILQASGKLKNPKARLASECLSPFDSTGKAIHLCQVCGRASRSHYSLGHHMRHSHVGEXSXKCPGCGKGFSTKLDLRW

SEQ ID NO: 10300 - protein, 100 aa, Homo sapiens
  misc_feature (1)...(100): Xaa = X or * as defined in Table 2
KKRSHCAQAGLELLSGQLGXTSSVQKIRKLAGCGGVHPWSQLLERLRWEDSLPQGGQGCSEPXSHHCTPAWATEXDPVSNNNKQKQKPKESNLSRATSRP

SEQ ID NO: 10301 - protein, 304 aa, Homo sapiens
  misc_feature (1)...(304): Xaa = X or * as defined in Table 2
KGDFQGHQGPWDAPPXPAFWWQREARGEGEAMSQSPCRGRGNAEMYRPSAQPETGPASGXXTEAARGSSGWAEPWPRGXKPPEFPMRLGWPFPTPGAFSLPILCDEERPXGQRSSGCESQQELRSPRETELQVTSPTCFSAGPRRPGPAPGGPQAARAYCCHLKTSSEPTFHQAPTQAEVSWEFSPAPPADKEMTSMATPEKCPTSQAPAIRKAALPHPERGNYFLSAAWPQGAPFPLWGSASPFVALPWSPRAGAAPLCPGKAPPSKTRLGRAVTFPXAEGGTGRGRGHVAVPLPWERQRGNV

SEQ ID NO: 10302 - protein, 853 aa, Homo sapiens
  DOMAIN (357)..(373): REGULATORY PROTEIN ROP SIGNATURE domain identified by eMATRIX, accession number PR00835B, p-value=1.000e-19, raw score of 11.52
  DOMAIN (344)..(404): Rop protein domain identified by PFam, accession name Rop, E- value=5.2e-44, PFam score of 159.6
MPLRAFNPVSSFRWARGMTIVAALMTVFFIMQLVGQVPAALWVIFGEDRFRWSATMIGLSLAVFGILHALAQAFVTGPATKRFGEKQAIIAGMAADALGYVLLAFATRGWMAFPIMILLASGGIGMPALQAMLSRQPNFDHWTADRHGDLCRLGEHMERVGMDCRRRPIPCLPPRVASRCMEPGHLDLNGSRRHLANGFTTPRIGANQFLRRTVNAQTNPWQNISIASAISSSRTRRISGSVGSWPRSGNAEVSALHHYVPDLHRRMLLATLWNTYICINEALALTLSDFSLVPPHPYRQLFTLTTFHNRACSSSVTRIVSILSRFIGIITPMNRNPPYTEASVTKQEKTALNMARFIRSQTLTLLEKLNELDADEQADICESLHDHADELYRSCLARFGDDGGATQAFAKENNQKAYKETYGVSHITRHDMLQIPKQQQNEKYQVPQFDQSTIKNIESAKGLDVWDSWPLQNADGTVAEYNGYHVVFALAGSPKDADDTSIYMFYQKVGDNSIDSWKNAGRVFKDSDKFDANDPILKDQTQEWSGSATFTSDGKIRLFYTDYSGKHYGKQSLTTAQVNVSKSDDTLKINGVEDHKTIFDGDGKTYQNVQQFIDEGNYTSGDNHTLRDPHYVEDKGHKYLVFEANTGTENGYQGEESLFNKAYYGGGTNFFRKESQKLQQSAKKRDAELANGALGIIELNNDYTLKKVMKPLITSNTVTDEIERANVFKMNGKWYLFTDSRGSKMTIDGINSNDIYMLGYVSNSLTGPYKPLNKTGLVLQMGLDPNDVTFTYSHFAVPQAKGNNVVITSYMTNRGFFEDKKATFAPSFLMNIKGNKTSVVKNSILEQGQLTVN

SEQ ID NO: 10303 - protein, 988 aa, Homo sapiens
  DOMAIN (748)..(786): Chloramphenicol acetyltransferase proteins domain identified by eMATRIX, accession number BL00100D, p-value=7.677e-36, raw score of 17.22
  DOMAIN (710)..(818): Chloramphenicol acetyltransferase domain identified by PFam, accession name CAT, E-value=4.9e-68, PFam score of 239.4
NFRLVGQTSVDRLLQLSQAQAVKGNQLLPVSLVKRKTTLAPNTQTASPRALADSLMQLARQVSRLESGQDFADFGTTIKQDFRLLGQTSVDRLLQLSQGQAVKGNQLLPVSLVKRKTTLAPNTQTASPRALADSLMQLARQVSRLESGQDFADFGTTIKQDFRLLGQTSVDRLLQLSQGQAVKGNQLLPVSLVKRKTTLAPNTQTASPRALADSLMQLARQVSRLESGQDFADFGTTIKQDFRLLGQTSVDRLLQLSQGQAVKGNQLLPVSLVKRKTTLAPNTQTASPRALADSLMQLARQVSRLESGQSCSTPPPNTDKQSKEKCPMKFTFQQVETNMTGDAVGMDDIPQEARQYRHNQAYAYSIQGDGAEDDDERIVRFHTRVTVDSDTLASDAARLTCRHGLGNQILNVMAGESGCEENCGNGGGGNKGNRNKRKQIRKRRKRAEPRKGPTKRGTPPTPTEARRARVARSEESTETPERRHQQRRTGDPQAPGARPCTAMRTTRNETQEKTLRAPTKPAKHKGGTESGKKHLAQTPRATAWTAYKRKTRKTSFSNLGLEGQTRFKRTKDDQHQRTPRVYAPQRAKRRARTGDTPKHLKRAYRVIPFVVTPTRDSADMIGPPKDFADFGTTIKQDFRLLGQTSVDRLLQLSQGQAVKGNQLLPVSLVKRKTTLAPNTQTASPRALADSLMQLARQVSRLESGQWKLRLLKAVKEKKAQFYPALIHICARLMNVHRRFRMAIKDGFIENMFFVSANPWVSFTSFDLNVANMDNFFAPVFTMGKYYTQGDKVLMPLAIQVHHAVCDGFHVGRMLNELQQYCDEWQGGADFADFGTTIKQDFRLLGQTSVDRLLQLSQGQAVKGNQLLPVSLVKRKTTLAPNTQTASPRALADSLMQLARQVSRLESGQDFADFGTTIKQDFRLLGQTSVDRLLQLSQGQAVKGNQLLPVSLVKRKTTLAPNTQTASPRALADSLMQLARQVSRLESGQ

SEQ ID NO: 10304 - protein, 195 aa, Homo sapiens
  misc_feature (1)...(195): Xaa = X or * as defined in Table 2
VLNGSGRPSQSKKHFPPKPGTFGGASVHQMFIMSLPAGPDLSGFDEDDKGWPENQLDMSDYSSSYQDVACYGTLPRDSPRRNKEGCTSKTPHALTVSPFKGIFSSATKVFQAPNACKRGAXGKGXPWEGKASSKPGRDFLREGRKMSWKLFNRKLISSQPYVPVGVCLTSVFTIASLGEQGMVFPLKVDLFKLTG

SEQ ID NO: 10305 - protein, 920 aa, Homo sapiens
  DOMAIN (37)..(83): kw TRANSCRIPTASE REVERSE II ORF2 domain identified by eMATRIX, accession number DM01354O, p-value=5.371e-18, raw score of 8.73
  DOMAIN (226)..(340): ParA family ATPase domain identified by PFam, accession name ParA, E-value=1.8e-26, PFam score of 101.4
MDKFLDTYTLPRLNQEEVESLNRPITGSEIEAIINSLPTKKSPGPDGFTSEFYQRYKETVVCRLSPPSFNGGLPLGSDLVFYAPGPQKIIWVMVHVGALALKDGFSPLDVGVHGFCRFRNHHQTGFSPAGANQRDPLAATLSGPGGEGQSAVARLTGEKKNHPGAQYANRLSPRVGRFINAAGTTGFPTGKRAVSATQLMVKDDVTYAIKLSCWPGLDIIPSCLALHRIETELMGKFDKGRLPTHPHLMLRLAIETVAHDYDVIVIDSAPNLGIGTINVVCAADVLIVPTPAELLDYTSALQFFDMLRDLLKNVDLKGFEPDVRILLTKYSNSNGSQSPWMEEQIRQAWGSMVLKNVEFCRFRTPHQPGFSPAGANQRGPLAATLSGPAGEGQSAVARLTGEKKNHPGAQYANRLSPRVGRFINAAGTTGFPTGKRAGIREISDLMIIGETVITRSPTGTRSPVGQFLAVWGGKLPSPAFGSGSRDFADFGTTIKQDFRLLGQTSVDRLLQLSQGQAVKGNQLLPVSLVKRKTTLAPNTQTASPRALADSLMQLARQVSRLESGQAWSLCTPIMWFYPRAFSRLRQLTRYSSSGGVAGCHSGKPSRKLSTLGFASLVQHSTLSRATLLIYKGFCRFRNPHQTGFSPAGANQRGPLAATLSGPGGEGQSAVARLTGEKKNHPGAQYANRLSPRVGRFINAAGTTGFPTGKRAVSATQLMDFADFGTTIKQDFRLLGQTSVDRLLQLSQGQAVKGNQLLPVSLVKRKTTLAPNTQTASPRALADSLMQLARQVSRLESGQDFADFGTTIKQDFRLLGQTSVDRLLQLSQGQAVKGNQLLPVSLVKRKTTLAPNTQTASPRALADSLMQLARQVSRLESGQLAGFPRQALNRGLPLGFRFSALRHLDPKKLDLGDGSRSGPSP

SEQ ID NO: 10306 - protein, 879 aa, Homo sapiens
  DOMAIN (166)..(209): 1 kw MIND INHIBITOR DIVISION CONTROL domain identified by eMATRIX, accession number DM01756B, p-value=6.178e-15, raw score of 22.91
  DOMAIN (286)..(397): Frataxin-like domain identified by PFam, accession name Frataxin_Cyay, E-value=4.3e-58, PFam score of 206.4
  misc_feature (1)...(879): Xaa = X or * as defined in Table 2
MEIRGRVEQRVGYTIEQINHMRDVFGTRLRRAEDVFPPVIGVAAHKGGVYKTSVSVHLAQDLALKGLRVLLVEGNDPQGTASMYHGWVPDLHIHAEDTLLPFYLGEKDDVTYAIKPTCWPGLDIIPSCLALHRIETELMGKFDEGKLPTDPHLMLRLAIETVAHDYDVIVIDSAPNLGIGTINVVCAADVLIVPTPAELFDYPSALQFFHMLCDLVKNVDLKGFEPGELAPLYGCWGLRTGIAVACAPHHASLNLHGLNQIRNVKKQSVYLMNLRKSGTLGHPGSVDETTYERLAEESLDSLAEFFEDLADKPYTFEDYDVSFGSGVLTGKLGRDLATYVINKQTPNKQIWLSSPSSGLKRYDWTEKNWVYSHDCVSLHDVLAAELTKALKTKLDLSSLAYSGKELDAQPGYYMLHAQYMLRPPLSSPMQHRAPETGPTSRNSVLNAVTPPAPTTPPSPLFDSRGSPRRKTYQNVQQFIDEGNYTSGDNHTLRDPHYVEDKGHKYLVFEANTGTENGYQGEESLFNKAYYGGGTNFFRKESQKLQQSAKKRDAELANGALGIIELNNDYTLKKVMKPLITSNTVTDEIERANVFKMNGKWYLFTDSRGSKMTIDXGSPXKIRLFYTDYSGKHYGKQSLTTAQVNVSKSDDTLKINGVEDHKTIFDGDGKTYQNVQQFIDEGNYTSGDNHTLRDPHYVEDKGHKYLVFEANTGTENGYQGEESLFNKAYYGGGTNFFRKESQKLQQSAKKRDAELANGALGIIELNNDYTLKKVMKPLITSNTAAANQESSHVQQQALALEQQFLERTQALEAQIVALERMRAADQTTAKQGMCTQVHLTNTSRHAGRPSKCQFCSTRRQRHRLSDPKQDLGNRRFSPPP

SEQ ID NO: 10307 - protein, 150 aa, Homo sapiens
  DOMAIN (48)..(62): Phage integrase family domain identified by eMATRIX, accession number PF00589B, p-value=1.621e-11, raw score of 16.17
  DOMAIN (1)..(94): "Phage" integrase family domain identified by PFam, accession name Phage_integrase, E-value=0.0047, PFam score of -14.6
MERRNRRTGRTEKARIWEVTDRTVRTWIGEAVAAAAADGVTFSVPVTPHTFRHSYAMHMLYAGIPLKVLQSLMGHKSISSTEVYTKVFALDVAARHRAIRVPRQQGDYRTRIWKFEDGLSNVLVIQLNKLIICVMCLVRDCDVLKTYFHL

SEQ ID NO: 10308 - protein, 63 aa, Homo sapiens
DGQQLIALHRLALRELQQAVHAGLPQQAKILFDGGSEIGKIPGVPPTPAKANNRRGYNPPFGL

SEQ ID NO: 10309 - protein, 1086 aa, Homo sapiens
EALLPGDQDSQSGKGVAAREVWFLPSSFAPVLLRLVGNHHVGDNSIDSWKNAGRVFKDSDKFDANDPILKDQTQEWSGSATFTSDGKIRLFYTDYSGKHYGKQSLTTAQVNVSKSDDTLKINGVEDHKTIFDGDGKTYQNVQQFIDEGNYTSGDNHTLRDPHYVEDKGHKYLVFEANTGTENGYQGEESLFNKAYYGGGTNFFRKESQKLQQSAKKRDAELANGALGIIELNNDYTLKKVMKPLITSNTVTDEIERANVFKMNGKWDFADSRNHHQTGFSPAGANQRGPLAATLSGPGGEGQSAVARLTGEKKNHPGAQYANRLSPRVGRFINAAGTTGFPTGKRAVSATQLMDFADFGTTIKQDFRLLGQTSVDRLLQLSQGQAVKGNQLLPVSLVKRKTTLAPNTQTASPRALADSLMQLARQVSRLESGHNYSKGQSKVSFKTRQVPSAYEPVKSKAGGCFRVAPNRAFKSRRDFADFGTTIKQDFRLLGQTSVDRLLQLSQGQAVKGNQLLPVSLVKRKTTLAPNTQTASPRALADSLMQLARQVSRLESGQDFADFGTTIKQDFRLLGQTSVDRLLQLSQGQAVKGNQLLPVSLVKRKTTLAPNTQTASPRALADSLMQLARQVSRLESGQIVRSATGQLIHNWTQRTQGFSPQPAGNPKRQVFSDASLEVAKVRYPLSTIGGPPSRGPGLPKWEGRGCKGSLVSPVFFCTCTFALGWKSSRRRQLNRQLEKRGPFFKDSDKFDANDPILKDQTQEWSGSATFTSDGKIRLFYTDYSGKHYGKQSLTTAQVNVSKSDDTLKINGVEDHKTIFDGDGKTYQNVQQFIDEGNYTSGDNHTLRDPHYVEDKGHKYLVFEANTGTENGYQGEESLFNKAYYGGGTNFFRKESQKLQQSAKKRDAELANGALGIIELNNDYTLKKVMKPLITSNTVTDEIERANVFKMNGKWDFADFGTTIKQDFRLLGQTSVDRLLQLSQGQAVKGNQLLPVSLVKRKTTLAPNTQTASPRALADSLMQLARQVSRLESGQDFADFGTTIKQDFRLLGQTSVDRLLQLSQGQANHLMTQFSEPVLIIEQRTTDEE

SEQ ID NO: 10310 - protein, 743 aa, Homo sapiens
  DOMAIN (377)..(420): 1 kw MIND INHIBITOR DIVISION CONTROL domain identified by eMATRIX, accession number DM01756B, p-value=4.822e-15, raw score of 22.91
  DOMAIN (342)..(456): ParA family ATPase domain identified by PFam, accession name ParA, E-value=2.7e-28, PFam score of 107.5
  misc_feature (1)...(743): Xaa = X or * as defined in Table 2
MKLMETLNQCINAGHEMTKAIAIAQFNDDSPEARKITRRWRIGEAADLVGVSSQAIRDAEKAGRLPHPDMEIRGRVEQRVGYTIEQINHMRDVFGTRLRRAEDVFPPVIGVAAHKGGVYKTSVSVHLAQDLALKGLRVLLVEGNDPQGTASMYHGWVPDLHIHAEDTLLPFYLGEKDDVTYAIKPTCWPGLDIIPSCLALHRIETEFMGKFDEDNNAGMVRVLQPFTSDEKKSVISTLTFPGKHLRRDKSLTTAQGCDKINNKTSPEPTSPDLALKGLRVLLVEGNDPQGTASMYHGWVPDLHIHAEDTLLPFYLGEKDDVTYAIKPTCWPGLDIIPSCLALHRIETELMGKFDEGKLPTDPHLMLRLAIETVAHDYDVIVIDSAPNLGIGTINVVCAADVLIVPTPAELFDYTSALQFFDMLRDLLKNVDLKGFEPDVRILLTKYSNSNGSQSPWMEEQIRDAWGSMVLKNVEPENGEVGKXGSPQLINQEKKMFRIRNRSYIDRDSEYLLQENEPDGTLDQKLLEDLQKKKNDLRYIEMQPFPLVSSSRWVVKRGELTAYVEDTVLFSRRTSKQQVYFFLFNDVLIITKKKRRSDSSLREGDNQKAYKETYGVSHITRHDMLQIPKQQQNEKYQVPQFDQSTIKNIESAKGLDVSDAGMVPVLQPLHLTEKSGYSTLTIPVNLRQTSLTQRKVMCQNLVTHLKSTEWEKHKTIVDGERKTYQKRSAVFRMKGILHSATTIR

SEQ ID NO: 10311 - protein, 331 aa, Homo sapiens
  misc_feature (1)...(331): Xaa = X or * as defined in Table 2
LPMALAVGFCRFRNHHQTGFSPAGANQRGPLAATLSGPGGEGQSAVARLTGEKKNHPGAQYANRLSPRVGRFINAAGTTGFPTGKRAGFCRFRNHHQTGFSPAGANQRGPLAATLSGPGGEGQSAVARLTGEKKNHPGAQYANRLSPRVGRFINAAGTTGFPTGKRAGFCRFRNHHQTGFSPAGANQRGPLAATLSGPGGEGQSAVARLTGEKKNHPGAQYANRLSPRVGRFINAAGTTGFPTGKRAQAQAKXWHYREPLLLRAQLTNPPSGQQLKSVDQWPVQKQFSSGSDLYQLHPFHVQHFLEPCFPRHPEFAPPSTGTESHYYCWIW

SEQ ID NO: 10312 - protein, 800 aa, Homo sapiens
  DOMAIN (42)..(87): UDP-glycosyltransferases proteins domain identified by eMATRIX, accession number BL00375F, p-value=1.000e-40, raw score of 16.99
  DOMAIN (27)..(114): UDP-glucoronosyl and UDP-glucosyl transferas domain identified by PFam, accession name UDPGT, E-value=1.3e-52, PFam score of 188.2
MQLARQVSRLESGQVKHEGQHTKMSQVLWRSQEENPATLGNNIQLFDWIPQNDLLGHPKTKAFITHGGTNGIYEAIYHGVPMVGVPMFADQPDNIAHMKAKGAAVEVNLNTMTRPGGEGQSAVARLTGEKKNHPGAQYANRLSPRVGRFINAAGTTGFPTGKRAVSATQLMDFADFGTTIKQDFRLLGQTSVDRLLQLSQGQAVKGNQLLPVSLVKRKTTLAPNTQTASPRALADSLMQLARQVSRLESGQDFADFGTTIKQDFRLLGQTSVDRLLQLSQGQAVKGNQLLPVSLVKRKTTLAPNTQTASPRALADSLMQLARQVSRLESGQILPDFGPHHQTEFSPAGANQRGPLAATLSGPGGEGQSAVARLTGEKKNHPGAQYANRLSPRVGRFINAAGTTGFPTGKRAVSATQLIPKVDKTTKIGKKQSRKTGNSKNQSASPPPKESSSSHATEQNWTENDFDELREEGFKRSNCSELQEEVQTHGKEVKNLEKKLDEWLTRITNEEKPLKDLMELKTKAQELRDKCTSLSSRFNQLEERVSVMEDQMNEMKREEKFREKRIKRNEQSLQEIWDYVKRPNLRLIGVPESDGENGTKLENTLQDIIQDFADFGTTIKQDFRLLGQTSVDRLLQLSQGQAVKGNQLLPVSLVKRKTTLAPNTQTASPRALADSLMQLARQVSRLESGHQAPCMKSNNALIVILGTVTLDAVGIGLVMPVLPGLLRDIVHSDSIASHYGVLLALYALMQFLCAPVLAALSDRFGRRTVLLASLLGATIDYAIMATTPVLWIYPLVNSPSC

SEQ ID NO: 10313 - protein, 1065 aa, Homo sapiens
  DOMAIN (745)..(783): Chloramphenicol acetyltransferase proteins domain identified by eMATRIX, accession number BL00100D, p-value=7.677e-36, raw score of 17.22
  DOMAIN (742)..(815): Chloramphenicol acetyltransferase domain identified by PFam, accession name CAT, E-value=9.8e-57, PFam score of 201.9
  misc_feature (1)...(1065): Xaa = X or * as defined in Table 2
MKLMETLNQCINAGHEMTKAIAIAQFNDDSPEARKITRRWRIGEAADLVGVSSQAIRDAEKAGRLPHPDMEIRGRVEQRVGYTIEQINHMRDVFGTRLRRAEDVFPPVIGVAAHKXSPVIGVAAHKGGVYKTSVSVHLAQDLALKGLRVLLVEGNDPQGTASMYHGWVPDLHIHAEDTLLPFYLGEKDDVTYAIKPTCWPGLDIIPSCLALHRIETELMGKFDEGKLPTDPHLMLRLAIETVAHDYDVIVIDSAPNLGIGTINVVCAADVLIVPTPAELFDYTSALQFFDMLRDLLKNVDLKGFEPDVRILLTKYSNSNGSQSPWMEEQIRDAWGSMVLKNVVRETDEVGKAVINHKKRKNSPRIVQSNDLTEAAYSLSRDQKRMLYLFVDQIRKSDGTLQEHDGICEIHVAKYAEIFGLTSAEAKDPRGVYKTSVSVHLAQDLALKGLRVLLVEGNDPQGTASMYHGWVPDLHIHAEDTLLPFYLGEKDDVTYAIKPTCWPGLDIIPSCLALHRIETELMGKFDEGKLPTDPHLMLRLAIETVAHDYDVIVIDSAPNLGIGTINVVCAADVLIVPTPAELFDYTSALQFFDMLRDLLKNVDLKGFEPDCINAGHEMTKAIAIAQFNDDSPEARKITRRWRIGEAADLVGVSSQAIRDAEKAGRLPHPDMEIRGRVEQRVGYTIEQINHMRDVFGTRLRRAEDVFPPVIGVAAHKGGVYKTSVSVHLAQDLALKGLRVLLVEGFIENMFFVSANPWVSFTSFDLNVANMDNFFAPVFTMGKYYTQGDKVLMPLAIQVHHAVCDGFHVGRMLNELQQYCDEWQGGADYRVLVGELDDEQMAALSRLGNDYRPTSAYERGQRYASRLQNEFAGNISALADAENISRKIITRCINTAKLPKSVVALFSHPGELSARSGDALQKAFTDKEELLKQQASNLHEQKKAGVFIRDKLMERRNRRTGRTEKARIWEVTDRTVRTWIGEAVAAAAADGVTFSVPVTPHTFRHSYAMHMLYAGIPLKVLQSLMGHKSISSTEVYTKVFALDVAARHRVQFAMPESDAVAMLKQLS

SEQ ID NO: 10314 - protein, 753 aa, Homo sapiens
  DOMAIN (582)..(611): kw REPLICATION REPB REPA INITIATION domain identified by eMATRIX, accession number DM00653A, p-value=7.207e-27, raw score of 20.40
  DOMAIN (237)..(351): ParA family ATPase domain identified by PFam, accession name ParA, E-value=1.3e-08, PFam score of 42.0
MKLMETLNQCINAGHEMTKAIAIAQFNDDSPEARKITRRWRIGEAADLVGVSSQAIRDAEKAGRLPHPDMEIRGRVEQRVGYTIEQINHMRDVFGTRLRRAEDVFPPVIGVAAHKGGVYKTSVSVHLAQDLALKGYVFCSWKCINAGHEMTKAIAIAQFNDDSPEARKITRRWRIGEAADLVGVSSQAIRDAEKAGRLPHPDMEIRGRVEQRVGYTIEQINHMRDVFGTRLRRAEDVFPPVIGVAAHKGGVYKTSVSVHLAQDLALKGLRVLLVEEPPSAPNLGIGTINVVCAADVLIVPTPAELFDYTSALQFFDMLRDLLKNVDLKGFEPDVRILLTKYSNSNGSQSPWMEEQIRDAWGSMVLKNVVRETDEVGKAAPMVDSLIARVGVMARGNAITLPVCGRDVKFTLEVLRGDSVEKTSRCDNLKTCHTSHGSVMAETAVINHKKRKNSPRIVQSNDLTEAAYSLSRDQKRMLYLFVDQIRKSDGTLQEHDGICEIHVAKYAEIFGLTSAEASKDIRQALKSFAGKEVVFYRPEEDAGDEKGYESFPWFIKRAHSPSRGLYSVHINPYLIPFFIGLQNRFTQFRLSETKEITNPYAMRLYESLCQYHPLTIEKVMKPLITSNTVTDEIERANVFKMNGKWYLFTDSRGSKMTIDGINSNDIYMLGYVSNSLTGPYKPLNKTGLVLQMGLDPNDVTFTYSHFAVPQAKGNNVVITSYMTNRGFFEDKKATFAPSFLMNIKGNKTSDKLPH

SEQ ID NO: 10315 - protein, 84 aa, Homo sapiens
  DOMAIN (6)..(34): !!!! PROTEIN ALU SUBFAMILY WARNING ENTRY NUCLEAR PHOSPHO domain identified by eMATRIX, accession number PD02454B, p-value= 4.064e-26, raw score of 11.61
  misc_feature (1)...(84): Xaa = X or * as defined in Table 2
GGWIMRSGVRDQPDQHGETLSLLKLQKLAGHGGACLXSQLVRRLRQEYHLNPGGGGCSEPRFGHCAPAWATEXDSVSGKKKKKK

SEQ ID NO: 10316 - protein, 1085 aa, Homo sapiens
  DOMAIN (657)..(692): Prion protein domain identified by eMATRIX, accession number BL00291A, p-value=7.072e-10, raw score of 4.49
  DOMAIN (913)..(1078): Zn-finger in Ran binding protein and others domain identified by PFam, accession name zf-RanBP, E-value=4.1e-38, PFam score of 140.0
  misc_feature (1)...(1085): Xaa = X or * as defined in Table 2
PNKTGGKTVSDGLHHPSQLHSKLENDQGFYNVDSSTGFHNKTNPVGPFRKSPFLVMGVDWAETRRSMMMQMRRAPMSDDILARDRGSRLSRGNRRNGGGGCRDDDDDGGGAGAVRTGEGATEELPPVGGRVRPQHRGELFVLSSAGDLHRDRDTHRGGAGSGGGSAMASGAGGVGGGGGGKIRTRRCHQGPIKPYQQGRQQHQVSSSRPDLSGFDEDDKGWPENQLDMSDYSSSYQDVACYGTLPRDSPRRNKEGSGCTSETPHALTVSPFKAFSPQPPKFFKPLMPVKEEHKKRIALEARPLLSQESMPPPQAHNPGCIVPSGSNGSSSQXNTIANVRRRLTLRRKKMSWKLLTGSXXVHSLMYLWSLLTSVFTMPAWRTGNGLSSKVDLSNSRVLEKEVSRSPTTSSITSGYFSHSASNATLSDMVVPCSDSSDQLAIQTKDADSTEHSTPSLVHDFRPSSNKELTEVEKGLVKDKIIVVPLKENSALAKGSPSSQSIPEKNSKSLCRTGSCSELDACPRKISQPAKGFCPRELKVCKHTNQHPVSSSRFVNPPIDTLYLAALVGPWRTFMSSSGIVNTPIGTLYLAQGSNGSSMPVEHNSKREKKIVSSGTISVILPGGPQLASPSGSHTGATGGLACQCSRSAPALLSPWAVHGTRRRAAGGGACRGGSGRAGAGGGGGGGHSXQGYRICXEYCARVATKILQQEEDVCSCSTDTSEVPRWPENKEDHLVYADEESSNITDGRITPEPAVSNTEGGHNENAAAGPHDSHSCASGRSSSRSPKAPTLSPVHTHHKKGALPEGTHRIGFTYGIPVLESTLXKPXGPPVCSTWGAETSIRPSPPAECSPPARPRRRWGPIPDAVVARAGFASPKIDSVAAQPTATSPVVYTRPAISSFSSSGIGFGESLKAGSSWQCDTCLLQNKVTDNKCIACQAAKLSPRDTAKQTGIETPNKSGKTTLSASGTGFGDKFKPVIGTWDCDTCLVQNKPEAIKCVACETPKPGTCVKRALTLTVVSESAETMTASSSSCTVTTGTLGFGDKFKRPIGSWECSVCCVSNNAEDNKCVSCMSEKPELQVFSGSNS

SEQ ID NO: 10317 - protein, 806 aa, Homo sapiens
MAETAVINHKKRKNSPRIVQSNDLTEAAYSLSRDQKRMLYLFVDQIRKSDGTLQEHDGICEIHVAKYAEIFGLTSAEASKDIRQALKSFAGKEVVFYRPEEDAGDEKGYESFPWFIKRAHSPSRGLYSVHINPYLIPFFIGLQNRFTQFRLNFVQKSRLVDLALKGLRVLLVEGNDPQGTASMYHGWVPDLHIHAEDTLLPFYLGEKDDVTYAIKPTCWPGLDIIPSCLALHRIETELMGKFDEAVINHKKRKNSPRIVQSNDLTEAAYSLSRDQKRMLYLFVDQIRKSDGTLQEHDGICEIHVAKYAEIFGLTSAEAIAEYNGYHVVFALAGSPKDADDTSIYMFYQKVGDNSIDSWKNAGRVFKDSDKFDANDPILKDQTQEWSGSATFTSDGKIRLFYTDYSGKHYGKQSLTTAQVNVSKSDDTLKINGVEDHKTIFDGDGKTYQNVQQFIDEGNYTSGDNHTLRDPHYVEDKGHKYLVFEANTGTENGYQGEESLFNKAYYGGGTNFFRKESQKLQQSAKKRDAELANGALDLTTAQVNVSKSDDTLKINGVEDHKTIFDGDGKTYQNVQQFIDEGNYTSGDNHTLRDPHYVEDKGHKYLVFEANTGTENGYQGEESLFNKAYYGGGTNFFRKESQKLQQSAKKRDAELANGALGIIELNNDYTLKKVMKPLITSNTVTDEIERANVFKMNGKWYLFTDSRGSKMTIDGINSNDIYMLGYVSNSLTGPYKPLNKTGLVLQMGLDPNDVTFTYSHFAVPQAKGNNVVITSACGAESTFYVEDPPGWSQTPGLKRSSCLGLPKC

SEQ ID NO: 10318 - protein, 1064 aa, Homo sapiens
  DOMAIN (443)..(467): Zinc finger, C2H2 type domain identified by PFam, accession name zf-C2H2, E-value=6.4e-05, PFam score of 29.8
TSKKIVKQAPVLTFTTALLAGGAIQAFAKENNHKAYKETYGVSHITRHDMLQIPKQQQNEKYQVPQFDQSTIKNIESAKGLDVWDSWPLQNADGTVAEYNGYHVVFALAGSPKDADDTSIYMFYQKVGDNSIDSWKNAGRVFKDSDKFDANDPILKDQTQEWSGSATFTSDGKIRLFYTDYSGKHYGKQSLTTAQVNVSKSDDTLKINGVEDHKTIFDGDGKTYQNVQQFIDEGNEGILPISEPPIKQDFRLLGQTSVDRLLQLSQGQAVKGNQLLPVSLVKRKTTLAPNTQTASPRALADSLMQLARQVSRLESGQDFADFGTTIKQDFRLLGQTSVDRLLQLSQGQAVKGNQLLPVSLVKRKTTLAPNTQTASPRALADSLMQLARQVSRLESGQDFADFGTTIKQDFRLLGQTSVDRLLQLSQGQAVKGNQLLPVSLKPYACQIPGCTKRYTDPSSLRKHVKAHSSKEQQARKKDHNSSPAREHNWTANEFDELTEVGFRRDFADFGTTIKQDFRLLGQTSVDRLLQLSQGQAVKGNQLLPVSLVKRKTTLAPNTQTASPRALADSLMQLARQVSRLESGQDFADFGTTIKQDFRLLGQTSVDRLLQLSQGQAVKGNQLLPVSLVKRKTTLAPNTQTASPRALADSLMQLARQVSRLESGQDFADFGTTIKQDFRLLGQTSVDRLLQLSQGQAVKGNQLLPVSLVKRKTTLAPNTQTASPRALADSLMQLARQVSRLESGQDFADFGTTIKQDFRLLGQTSVDRLLQLSQGQAVKGNQLLPVSLVKRKTTLAPNTQTASPRALADSLMQLARQVSRLESGQDFADFGTTIKQDFRLLGQTSVDRLLQLSQGQAVKGNQLLPVSLVKRKTTLAPNTQTASPRALADSLMQLARQVSRLESGQDFADFGTTIKQDFRLLGQTSVDRLLQLSQGQAVKGNQLLPVSLVKRKTTLAPNTQTASPRALADSLMQLARQVSRLESGQDFADFGTTIKQDFRLLGQTSVDRLLQLSQGQAVKGNQLLPVSLVKRKTTLAPNTQTASPRALADSLMQLARQVSRLESGQ

SEQ ID NO: 10319 - protein, 415 aa, Homo sapiens
GATQAFAKENNQKAYKETYESAKGLDVWDSWPLQNADGTVAEYNGYHVVFALAGSPKDADDTSIYMFYQKVGDNSIDSWKNAGRVFKDSDKFDANDPILKDQTQEWSGSATFTSDGKIRLFYTDYSGKHYGKQSLTTAQVNVSKSDDTLKINGVEDHKTIFDGDGKTYQNVQQFIDEGNYTSGDNHTLRDPHYVEDKGHKYLVFEANTGTENGYQGEESLFNKAYYGGGTNFFRKESQKLQQSAKKRDAELANGALGIIELNNDYTLKKVMKPLITSNTVTDEIERANVFKMNGKWYLFTDSRGSKMTIDGINSNDIYMLGYVSNSLTGPYKPLNKTGLVLQMGLDPNDVTFTYSHFAVPQAKGNNVVITSYMTNRGFFEDKKATFAPSFLMNIKGNKTSVVKNSILEQGQLTVN

SEQ ID NO: 10320 - protein, 1329 aa, Homo sapiens
  DOMAIN (735)..(774): kw TRANSCRIPTASE REVERSE II ORF2 domain identified by eMATRIX, accession number DM01354X, p-value=1.122e-15, raw score of 13.86
  DOMAIN (356)..(446): ParB-like nuclease domain identified by PFam, accession name ParBc, E-value=0.00041, PFam score of 26.2
MILKPKDGNIEEVNSLRKQRAGSSSSKMNSLGFCRFRNHHQTGFSPAGANQRGPLAATLSGPGGEGQSAVARLTGEKKNHPGAQYANRLSPRVGRFINAAGTTGFPTGKRAVSATQLMDFADFGTTIKQDFRLLGQTSVDRLLQLSQGQAWKIPKTIFDGDGKTYQNVQQFIDEGNYTSGDTHTLRDPHYVEDKGHKYLVFEANTGTENGYQGEESLFNKAYYGGGTNFFRKESQKLQQSAKKRDAELANGALGIIELNNDYTLKKVMKPLITSNTVTDEIERANVFKMNGKWYLFTDSRGSKMTIDDTSLSTPAAPMVDSLIARVGVMARGNAITLPVCGRDVKFTLEVLRGDSVEKTSRVWSGNERDQELLTEDALDDLIPSFLLTGQQTPAFGRRVSGVIEIADGSRRRKAAALTESDYRVLVRKLFFLVHCSELSTILVGNIPAMVPNLLILPLHCYDIVHPKRSEVISPSYRILYHHEKEDVGCLIDVNILDLNGLQPVLQSQSISLVQQSEFSLEVTQYQEREPVLVRASPSCSVDVTERAGSSLQSPLLSADLTTAQTPSEFLALTEDSVSEMDAFSKSGSMASHCDNFGHNDSTSQMSLNSAAVTKTTTELTGTVPCAIMSPGKYRLEGQCSTESNSLPETSAANQKEVLLQIAELPATSVSHSESNLPADSEREENIGLQNAACSWGRGDTSTPVVTPTGTMLGQTRSQNSTGSFPRPAIATTYLYVCSRSRALQSAELEKTTLKFIWSQKRACIVKSILSQKNKAGGITLPDFKLYYKATVTKTAWDFADFGTTIKQDFRLLGQTSVDRLLQLSQGQAVKGNQLLPVSLVKRKTTLAPNTQTASPRALADSLMQLARQVSRLESGQAIKNHSLPRKTLQCLPYILTGFRRGQSEYFSILSNKALADTVMFLDFADFGTTIKQDFRLLGQTSVDRLLQLSQGQAVKGNQLLPVSLVKRKTTLAPNTQTASPRALADSLMQLARQVSRLESGQSPQSGLKHAFSQLLCFDYYLLSTKSLFTTWPQLSALTALSTVGHNPFSEQSALLDQYGDQTQEWSGSATFTSDGKIRLFYTDYSGKHYGKQSLTTAQVNVSKSDDTLKINGVEDHKTIFDGDGKTYQNVQQFIDEGNYTSGDNHTLRDPHYVEDKGHKYLVFEANTGTENGYQGEESLFNKAYYGGGTNFFRKESQKLQQSAKKRDAELANGALGIIELNNDYTLKKVMKPLITSNTVTDEIERANVFKMNGKWYLFTDSRGSKMTIDGINSNDIYMLGYVSNSLTCYPLPSPGILHAVLFFIIHVVDPTNGILSSNKRNKVLKQATT

SEQ ID NO: 10321 - protein, 81 aa, Homo sapiens
  misc_feature (1)...(81): Xaa = X or * as defined in Table 2
QGAGFSSSLRMASIFSIHSVGTRDLSRLSTILSPLYNTVAPGANXCRELKLVLDADDVLSTEVKRVITSSASNITPAFFCS

SEQ ID NO: 10322 - protein, 63 aa, Homo sapiens
DGQQLIALHRLALRELQQAVHAGLPQQAKILFDGGSETRQNPLQQLVHMGLPRPLDKKNFQEP

SEQ ID NO: 10323 - protein, 436 aa, Homo sapiens
  DOMAIN (158)..(187): kw REPLICATION REPB REPA INITIATION domain identified by eMATRIX, accession number DM00653A, p-value=4.759e-09, raw score of 20.40
CDNLKTCHTSHGSVMAETAVINHKKRKNSPRIVQSNDLTEAAYSLSRDQKRMLYLFVDQIRKSDGTLQEHDGICEIHVAKYAEIFGLTSAEASKDIRQALKSFAGKEVVFYRPEEDAGDEKGYESFPWFIKRAHSPSRGLYSVHINPYLIPFFIGLQNRFTQFRLSETKEITNPYAMQSPYTDYSGKHYGKQSLTTAQVNVSKSDDTLKINGVEDHKTIFDGDGKTYQNVQQFIDEGNYTSGDNHTLRDPHYVEDKGHKYLVFEANTGTENGYQGEESLFNKAYYGGGTNFFRKESQKLQQSAKKRDAELANGALGIIELNNDYTLKKVMKPLITSNTVTDEIERANVFKMNGKWYLFTDSRGSKMTIDAGISHKKRKNSPRIVQSNDLTEAAYSLSRDQKRMLYLFVDQIRKSDGTLQEHDGICEIHVAKYAEIF

SEQ ID NO: 10324 - protein, 2345 aa, Homo sapiens
  DOMAIN (1160)..(1176): Spectrin repeat proteins domain identified by eMATRIX, accession number PF00435B, p-value=2.607e-10, raw score of 13.41
  DOMAIN (22)..(1859): Spectrin repeat domain identified by PFam, accession name spectrin, E-value=3.8e-146, PFam score of 498.9
MLIGAFQISDFQIWDAQPMFQKEQVDPLQMKLQQVNGLGQGLIQSAGKDCDVQGLEHDMEEINARWNTLNKKVAQRIAQLQEALLHCGKFQDALEPLLSWLADTEELIANQKPPSAEYKVVKAQIQEQKLLQRLLDDRKATVDMLQAEGGRIAQSAELADREKITGQLESLESRWTELLSKAAARQKQLEDILVLAKQFHETAEPISDFLSVTEKKLANSEPVGTQTAKIQQQIIRHKALEEDIENHATDVHQAVKIGQSLSSLTSPAEQGVLSEKIDSLQARYSEIQDRCCRKAALLDQALSNARLFGEDEVEVLNWLAEVEDKLSSVFVKDFKQDVLHRQHADHLALNEEIVNRKKNVDQAIKNGQALLKQTTGEEVLLIQEKLDGIKTRYADITVTSSKALRTLEQARQLATKFQSTYEELTGWLREVEEELATSGGQSPTGEQIPQFQQRQKELKKEVMEHRLVLDTVNEVSRALLELVPWRAREGLDKLVSDANEQYKLVSDTIGQRVDEIDAAIQRSQQYEQAADAELAWVAETKRKLMALGPIRLEQDQTTAQLQVQKAFSIDIIRHKDSMDELFSHRSEIFGTCGEEQKTVLQEKTESLIQQYEAISLLNSERYARLERAQVLVNQFWETYEELSPWIEETRALIAQLPSPAIDHEQLRQQQEEMRQLRESIAEHKPHIDKLLKIGPQLKELNPEEGEMVEEKYQKAENMYAQIKEEVRQRALALDEAVSQSTQFHDKIEPMLETLENLSSRLRMPPLIPAEVDKIRECISDNKSATVELEKLQPSFEALKRRGEELIGRSQGADKDLAAKEIQDKLDQMVFFWEDIKARAEEREIKFLDVLELAEKFWYDMAALLTTIKDTQDIVHDLESPGIDPSIIKQQVEAAETIKEETDGLHEELEFIRILGADLIFACGETEKPEVRKSIDEMNNAWENLNKTWKERLEKLEDAMQAAVQYQDTLQAMFDWLDNTVIKLCTMPPVGTDLNTVKDQLNEMKEFKVEVYQQQIEMEKLNHQGELMLKKATDETDRDIIREPLTELKHLWENLGEKIAHRQHKLEGALLALGQFQHALEELMSWLTHTEELLDAQRPISGDPKVIEVELAKHHVLKNDVLAHQATVETVNKAGNELLESSAGDDASSLRSRLEAMNQCWESVLQKTEEREQQLQSTLQQAQGFHSEIEDFLLELTRMESQLSASKPTGGLPETAREQLDTHMELYSQLKAKEETYNQLLDKGRLMLLSRDDSGSGSKTEQSVALLEQKWHVVSSKMEERKSKLEEALNLATEFQNSLQEFINWLTLAEQSLNIASPPSLILNTVLSQIEEHKVFANEVNAHRDQIIELDQTGNQLKFLSQKQDVVLIKNLLVSVQSRWEKVVQRSIERGRSLDDARKRAKQFHEAWKKLIDWLEDAESHLDSELEISNDPDKIKLQLSKHKEFQKTLGGKQPVYDTTIRTGRALKEKTLLPEDSQKLDNFLGEVRDKWDTVCGKSVERQHKLEEALLFSGQFMDALQALVDWLYKVEPQLAEDQPVHGDLDLVMNLMDAHKVFQKELGKRTGTVQVLKRSGRELIENSRDDTTWVKGQLQELSTRWDTVCKLSVSKQSRLEQALKQAEVFRDTVHMLLEWLSEAEQTLRFRGALPDDTEALQSLIDTHKEFMKKVEEKRVDVNSAVAMGEVILAVCHPDCITTIKHWITIIRARFEEVLTWAKQHQQRLETALSELVANAELLEELLAWIQWAETTLIQRDQEPIPQNIDRVKALIAEHQTFMEEMTRKQPDVDRVTKTYKRKNIEPTHAPFIEKSRSGGRKSLSQPTPPPMPILSQSEAKNPRINQLSARWQQVWLLALERQRKLNDALDPSIVSPKCRRPGGRQAYPLVNSGGSKRQIAKNRGATQAFAKENNQKAYKETYGVSHITRHDMLQIPKQQQNEKYQVPQFDQSTIKNIESAKGLDVWDSWPLQNADGTVAEYNGYHVVFALAGSPKDADDTSIYMFYQKVGDNSIDSWKNAGRVFKDSDKFDANDPILKDQTQEWSGSATFTSDGKIRLFYTDYSGKHYGKQSLTTAQVNVSKSDDTLKINGVEDHKTIFDGDGKTYQNVQQFIDEGNYTSGDNHTLRDPHYVEDKGHKYLVFEANTGTENGYQGEESLFNKAYYGGGTNFFRKESQKLQQSAKKRDAELANGALGIIELNNDYTLKKVMKPLITSNTVTDEIERANVFKMNGKWYLFTDSRGSKMTIDGINSNDIYMLGYVSHSLTGPYKPLNKTGLVLQMGLDPNDVTFTYSHFAVPQAKGNNVVITSYMTNRGFFEDKKATFAPSFLMNIKGNKTSVVKNSILEQGQLTVN

SEQ ID NO: 10325 - protein, 776 aa, Homo sapiens
  DOMAIN (235)..(278): 1 kw MIND INHIBITOR DIVISION CONTROL domain identified by eMATRIX, accession number DM01756B, p-value=4.822e-15, raw score of 22.91
  DOMAIN (200)..(305): ParA family ATPase domain identified by PFam, accession name ParA, E-value=2.8e-21, PFam score of 84.1
MKLMETLNQCINAGHEMTKAIAIAQFNDDSPEARKITRRWRIGEAADLVGVSSQAIRDAEKAGRLPHPDMEIRGRVEQRVGYTIEQINHMRDVFGTRLRRAEDVFPPVIGVAAHKGGVYKTSVSVHLAQDLALKGLRVLLVEGNDPQGTASMYHGWVPDLHIHAEDTLLPFYLGEKDDVTYAIKPTCWPGLDIIPSCLALHRIETELMGKFDEGKLPTDPHLMLRLAIETVAHDYDVIVIDSAPNLGIGTINVVCAADVLIVPTPAELFDYTSALQFFDMLRDLLKNVDLKGSQKTVHTEGDMNMNIKKIVKQATVLTFTTALLAGGATQAFAKENNQKAYKETYGVSHITRHDMLQIPKQQQNEKYQVPQFDQSTIKNIESAKGLDVWDSWPLQNADGTVAEYNGYHVVFALAGSPKDADDTSIYMFYQKVGDNSIDSWKNAGRVFKDSDKFDANDPILKDQTQEWSGSATFTSDGKIRLFYTDYSGKHYGKQSLTTAQVNVSKSDDTLKINGVEDHKTIFDGDGKTYQNVQQFIDEGNYTSGDNHTLRDPHYVEDKGHKYLVFEANTGTENGYQGEESLFNKAYYGGGTNFFRKESQKLQQSAKKRDAELANGALGIIELNNDYTLKKVMKPLITSNTVTDEIERANVFKMNGKWYLFTDSRGSKMTIDGINSNDIYMLGYVSNSLTGPYKPLNKTGLVLQMGLDPNDVTFTYSHFAVPQAKGNNVVITSYMTNRGFFEDKKATFAPSFLMNIKGNKTSVVKNSILEQGQLTVN

SEQ ID NO: 10326 - protein, 776 aa, Homo sapiens
  DOMAIN (268)..(323): ELEMENT INSERTION TRANSPOSABLE SEQUENCE TRANSPOSASE FOR domain identified by eMATRIX, accession number PD02662D, p-value= 3.973e-10, raw score of 21.71
MCELDILHDSLYQFCPELHLKRLNSLTLACHALLDCKTLTLTELGRNLPTKARTKHNIKRIDRLLGNRHLHKERLAVYRWHASFICSGNTMPIVLVDWSDIREQKRLMVLRASVALHGRSVTLYEKAFPLSEQCSKKAHDQFLADLASILPSNTTPLIVSDAGFKVPWYKSVEKLGWYWLSRVRGKVQYADLGAENWKPISNLHDMSSSHSKTLGYKRLTKSNPISCQILLYKSRSKGRKNQRSTRTHCHHPSPKIYSASAKEPWVLATNLPVEIRTPKQLVNIYSKRMQIEETFRDLKSPAYGLGLRHSRTSSSERFDIMLLIALMLQLTCWLAGVHAQKQGWDKHFQANTVRNRNIPKQQQNEKYQVPQFDQSTIKNIESAKGLDVWDSWPLQNADGTVAEYNGYHVVFALAGSPKDADDTSIYMFYQKVGDNSIDSWKNAGRVFKDSDKFDANDPILKDQTQEWSGSATFTSDGKIRLFYTDYSGKHYGKQSLTTAQVNVSKSDDTLKINGVEDHKTIFDGDGKTYQNVQQFIDEGNYTSGDNHTLRDPHYVEDKGHKYLVFEANTGTENGYQGEESLFNKAYYGGGTNFFRKESQKLQQSAKKRDAELANGALGIIELNNDYTLKKVMKPLITSNTVTDEIERANVFKMNGKWYLFTDSRGSKMTIDGINSNDIYMLGYVSNSLTGPYKPLNKTGLVLQMGLDPNDVTFTYSHFAVPQAKGNNVVITSYMTNRGFFEDKKATFAPSFLMNIKGNKTSVVKNSILEQGQLTVN

SEQ ID NO: 10327 - protein, 141 aa, Homo sapiens
  misc_feature (1)...(141): Xaa = X or * as defined in Table 2
KAYASLSLWQAPSGESRPAPAAADLRGSSGRPPXTFPNPPCGPHTGCPAGSFPISFQPRCLLVAKSKPGMPVSDEAAYESPWKGGAGAPALGLLGALSSEVADRALQAAPAWAPRDAGRGDLPGQDRPQGPAGASLGPSRS

SEQ ID NO: 10328 - protein, 846 aa, Homo sapiens
  DOMAIN (693)..(736): 1 kw MIND INHIBITOR DIVISION CONTROL domain identified by eMATRIX, accession number DM01756B, p-value=4.822e-15, raw score of 22.91
  DOMAIN (658)..(772): ParA family ATPase domain identified by PFam, accession name ParA, E-value=2.7e-28, PFam score of 107.5
MPRQVGSGPGPLLGVAGQAAVGTGGKKSLCQYRKPDGSGIVSLKIDWIIERYQLPQSYQHRKAGECLLHEYEDLVPIRDTLRLFPGGRYLPRAKHVAPSEPDPEQDEQKLRDFADFGTTIKQDFRLLGQTSVDRLLQLSQGQAVKGNQLLPVSLVKRKTTLAPNTQTASPRALADSLMQLARQVSRLESGQDFADFGTTIKQDFRLLGQTSVDRLLQLSQGQAVKGNQLLPVSLVKRKTTLAPNTQTASPRALADSLMQLARQVSRLESGQDFADFGTTIKQDFRLLGQTSVDRLLQLSQGQAVKGNQLLPVSLVKRKTTLAPNTQTASPRALADSLMQLARQVSRLESGQDFADFGTTIKQDFRLLGQTSVDRLLQLSQGQAVKGNQLLPVSLVKRKTTLAPNTQTASPRALADSLMQLARQVSRLESGQDFADFGTTIKQDFRLLGQTSVDRLLQLSQGQAVKGNQLLPVSLVKRKTTLAPNTQTASPRALADSLMQLARQVSRLESGQDFADFGTTIKQDFRLLGQTSVDRLLQLSQGQAVKGNQLLPVSLVKRKTTLAPNTQTASPRALADSLMQLARQVSRLESGQDFADFGTTIKQDFRLLGQTSVDRLLQLSQGQAVKGNQLLPVSLDDVTYAIKPTCWPGLAIIPSCLALHRIETELMGKFDEGKLPTDPHLMLRLAIETVAHDYDVIVIDSAPNLGIGTINVVCAADVLIVPTPAELFDYTSALQFFDMLRDLLKNVDLKGFEPDVRILLTKYSNSNGSQSPWMEEQIRDAWGSMVLKNVVRETDEVGKGQIRMRTVFEQAIDQRSSTGAWRNALSIWEPVCNEIFDRLIKPRWEIR

SEQ ID NO: 10329 - protein, 1283 aa, Homo sapiens
  DOMAIN (1144)..(1187): 1 kw MIND INHIBITOR DIVISION CONTROL domain identified by eMATRIX, accession number DM01756B, p-value=4.822e-15, raw score of 22.91
  DOMAIN (1109)..(1223): ParA family ATPase domain identified by PFam, accession name ParA, E-value=2.7e-28, PFam score of 107.5
MCELDILHDSLYQFCPELHLKRLNSLTLACHALLDCKTLTLTELGRNLPTKARTKHNIKRIDRLLGNRHLHKERLAVYRWHASFICSGNTMPIVLVDWSDIREQKRLMVLRASVALHGRSVTLYEKAFPLSEQCSKKAHDQFLADLASILPSNTTPLIVSDAGFKVPWYKSVEKLGWYWLSRVRGKVQYADLGAENWKPISNLHDMSSSHSKTLGYKRLTKSNPISCQILLYKSRSKGRKNQRSTRTHCHHPSPKIYSASAKEPWVLATNLPVEIRTPKQLVNIYSKRMQIEETFRDLKSPAYGLGLRHSRTSSSERFDIMLLIALMLQLTCWLAGVHAQKQGWDKHFQANTVRNRNLKIYSHMVTLWGNYEGISQYQVPQFDQSTIKNIESAKGLDVWDSWPLQNADGTVAEYNGYHVVFALAGSPKDADDTSIYMFYQKVGDNSIDSWKNAGRVFKDSDKFDANDPILKDQTQEWSGSATFTSDGKIRLFYTDYSGKHYGKQSLTTAQVNVSKSDDTLKINGVEDHKTIFDGDGKTYQNVQQFIDEGNYTSGDNHTLRDPHYVEDKGHKYLVFEANTGTENGYQGEESLFNKAYYGGGTNFFRKESQKLQQSAKKRDAELANGALGIIELNNDYTLKKVMKPLITSNTVTDEIERANVFKMNGKWYLFTDSRGSKMTIDGINSNDIYMLGYVSNSLTGPYKPLNKTGLVLQMGLDPNDVTFTYSHFAVPQAKGNNVVITSYMTNRGFFEDKKATFAPSFLMNIKGNRGTEGKQGIQYFPHKPLGVGSPHIRFDYLLVSILPSIRNPTGKFVVKDLAKRKNYAPVAMLQSAMTRTHNHRSCEEPVKDMLLAFPNDRAATIRSKDHHKHFRDFADFGTTIKQDFRLLGQTSVDRLLQLSQGQAVKGNQLLPVSLVKRKTTLAPNTQTASPRALADSLMQLARQVSRLESGQDFADFGTTIKQDFRLLGQTSVDRLLQLSQGQAHAIVTGDAVGMDDIPQEARQYRHNQAYAYSIQGDGAEDDDERIVRFHTRVTVDSDTLASDAARLTCRHGLGNQGTAPMYHGWVPDLHIHAEDTLLPFYLGEKDDVTYAIKPTCWPGLDIIPSCLALHRIETELMGKFDEGKLPTDPHLMLRLAIETVAHDYDVIVIDSAPNLGIGTINVVCAADVLIVPTPAELFDYTSALQFFDMLRDLLKNVDLKGFEPDVRILLTKYSNSNGSQSPWMEEQIRDAWGSMVLKNVVRETDEVGKGQIRMRTVFEQAIDQRSSTGAWSNALSILGTCLQ

SEQ ID NO: 10330 - protein, 2221 aa, Homo sapiens
  DOMAIN (15)..(48): Chloramphenicol acetyltransferase proteins domain identified by eMATRIX, accession number BL00100E, p-value=2.929e-33, raw score of 15.41
MDNFFAPVFTMGKYYTQGDKVLMPLAIQVHHAVCDGFHVGRMLNELQQYCDEWQGGADFADFGTTIKQDFRLLGQTSVDRLLQLSQGQAVKGNQLLPVSLRKQNTSRPPSMHVDDFVAAESKEVVPQDGIPPPKRPLKVSQKISSRVENLNTLNLPKELMLCHHQEEGAGEDLDRVYDLMIFFVRENRTQVDHHLCMWMTLLLLKVKKWFLKMEYLHQNGHSKYHRRFLPVVGFQAIEEDGVLSTVRIGFSHHLLQKALQNFQRYTGIQHVHRIGMAERMWCDRNRERHTVSSSGGNRLPNPGPGGEGQSAVARLTGEKKTHPGAQYANRLSPRVGRFINAAGTTGFPTGKRAVSATQLMDFADFGTTIKQDFRLLGQTSVDRLLQLSQGQAVKGNQLLPVSLVKRKTTLAPNTQTASPRALADSLMQLARQVSRLESGQDFADFGTTIKQDFRLLGQTSVDRLLQLSQGQAVKGNQLLPVSLVKRKTTLAPNTQTASPRALADSLMQLARQVSRLESGQDFADFGTTIKQDFRLLGQTSVDRLLQLSQGQAVKGNQLLPVSLVKRKTTLAPNTQTASPRALADSLMQLARQVSRLESGQDFADFGTTIKQDFRLLGQTSVDRLLQLSQGQAVKGNQLLPVSLAIRDAEKAGRLPHPDMEIRGRVEQRVGYTIEQINHMRDVFGTRLRRAEDVFPPVIGVAAHKGGVYKTSVSVHLAQDLALKGLRVLLVEGNDPQGTASMYHGWVPDLHIHAEDTLLPFYLGEKDDVTYAIKPTCWPGLDIIPSCLALHRIETELMGKFDEGKLPTDPHLMLRLAIETVAHDYDVIVIDSAPNLGIGTINVVCAADVLIVPTPAELFDYTSALQFFDMLRDLLKNDFRLLGQTSVDRLLQLSQGQAVKGNQLLPVSLVKRKTTLAPNTQTASPRALADSLMQLARQVSRLESGQDFADFGTTIKQDFRLLGQTSVDRLLQLSQGQAVKGNQLLPVSLVKRKTTLAPNTQTASPRALADSLMQLARQVSRLESGQDFADFGTTIKQDFRLLGQTSVDRLLQLSQGQAVKGNQLLPVSLVKRKTTLAPNTQTASPRALADSLMQLARQVSRLESGQDFADFGTTIKQDFRLLGQTSVDRLLQLSQGQAVKGNQLLPVSLACKTTFQACSPYLKLKEEYSFQSEEDQRNTKLYQQLVRNSYDHDYEFELGTHMDNFFAPVFTMGKYYTQGDKVLMPLAIQVHHAVCDGFHVGRMLNELQQYCDEWQGGADFADFGTTIKQDFRLLGQTSVDRLLQLSQGQAVKGNQLLPVSLVKRKTTLAPNTQTASPRALADSLMQLARQVSRLESGQDFADFGTTIKQDFRLLGQTSVDRLLQLSQGQAVKGNQLLPVSLVKRKTTLAPNTQTASPRALADSLMQLARQVSRLESGQDFADFGTTIKQDFRLLGQTSVDRLLQLSQGQAVKGNQLLPVSLVKRKTTLAPNTQTASPRALADSLMQLARQVSRLESGQDFADFGTTIKQDFRLLGQTSVDRLLQLSQGQAVKGNQLLPVSLGFCRFRNHPIKQDFRLLGQTSVDRLLQLSQGQAVKGNQLLPVSLGFCRFRNPPIKQDFRLLGQTSVDRLLQLFSGPGGEGQSAVARLTGEKKNHPGAQYANRLSPRVGRFINAAGTTGFPTGKRAVSATQLMDFADFGTTIKQDFRLLGQTSVDRLLQLSQGQAVKGNQLLPVSLVKRKTTLAPNTQTASPRALADSLMQLARQVSRLESGQDFADFGTTIKQDFRLLGQTSVDRLLQLSQGQAVKGNQLLPVSLVKRKTTLAPNTQTASPRALADSLMQLARQVSRLESGQDFADFGTTIKQDFRLLGQTSVDRLLQLSQGQAVKGNQLLPVSLEHDGICEIHVAKYAEIFGLTSAEASKDIRQALKSFAGKEVVFYRPEEDAGDEKGYESFPWFIKRAHSPSRGLYSVHINPYLIPFFIGLQNRFTQFRLSETKEITNPYAMRLYESLCQYRKPDGSGIVSLKIDWIIERYQLPQSYQRMPDFRRRFLQVCVNEINSRTPMRLSYIEKKKGRQTTHICKLVEANNPQAISQQDLVHMAIQIACGMSYLARTEVIHKDLAARNCITDDTLQVKITDNAVSWTITVWKTMKTGQFVGWLLKVWLITSFLALVMCGAFGVMLWELMTLGQTPYMDTDPFEMAAYLKDGYRIAQPINCPDEPFAVMACCWALDPGERPKFQQL

SEQ ID NO: 10331 - protein, 742 aa, Homo sapiens
  DOMAIN (272)..(327): ELEMENT INSERTION TRANSPOSABLE SEQUENCE TRANSPOSASE FOR domain identified by eMATRIX, accession number PD02662D, p-value= 3.973e-10, raw score of 21.71
SDNKMCELDILHDSLYQFCPELHLKRLNSLTLACHALLDCKTLTLTELGRNLPTKARTKHNIKRIDRLLGNRHLHKERLAVYRWHASFICSGNTMPIVLVDWSDIREQKRLMVLRASVALHGRSVTLYEKAFPLSEQCSKKAHDQFLADLASILPSNTTPLIVSDAGFKVPWYKSVEKLGWYWLSRVRGKVQYADLGAENWKPISNLHDMSSSHSKTLGYKRLTKSNPISCQILLYKSRSKGRKNQRSTRTHCHHPSPKIYSASAKEPWILATNLPVEIRTPKQLVNIYSKRMQIEETFRDLKSPAYGLGLRHSRTSSSERFDIMLLIALMLQLTCWLAGVHAQKQGWDKHFQANTVRNRNLKIYSHMVTLWGNYEGISQTQAFAKENNQKAYKETYGVSHITRHDMLQIPKQQQNEKYQVPQFDQSTIKNIESAKGLDVWDSWPLQNADGTVAEYNGYHVVFALAGSPKDADDTSIYMFYQKVGDNSIDSWKNAGRVFKDSDKFDANDPILKDQTQEWSGSATFTSDGKIRLFYTDYSGKHYGKQSLTTAQHTVNARGLQSKDMKSYNQPPYVLWSSSWSHTGTENGYQGEESLFNKAYYGGGTNFFRKESQKLQQSAKKRDAELANGALGIIELNNDYTLKKVMKPLITSNTVTDEIERANVFKMNGKWYLFTDSRGSKMTIDGINSNDIYMLGYVSNSLTGPYKPLNKTRLVLQMGLDPNDVTFTYSHFAVPQAKGNNG

SEQ ID NO: 10332 - protein, 1872 aa, Homo sapiens
  DOMAIN (824)..(867): 1 kw MIND INHIBITOR DIVISION CONTROL domain identified by eMATRIX, accession number DM01756B, p-value=4.822e-15, raw score of 22.91
CSWHDRFPDWKAGRILPISEPPSNRIFACWGKPAWTGLLQLSQGQAVKGNQLLPVSLGFRGPPASNPGGAPGSASVAAAAAVAAKAAAAAAPPVDNAAPHSAAKLEERRKPDPRRDFADFGTTIKQDFRLLGQTSVDRLLQLSQGQAVKGNQLLPVSLVKRKTTLAPNTQTASPRALADSLMQLARQVSRLESGQDFADFGTTIKQDFRLLGQTSVDRLLQLSQGQAVKGNQLLPVSLVKRKTTLAPNTQTASPRALADSLMQLARQVSRLESGQDFADFGTTIKQDFRLLGQTSVDRLLQLSQGQAVKGNQLLPVSLVKRKTTLAPNTQTASPRALADSLMQLARQVSRLESGQDFADFGTTIKQDFRLLGQTSVDRLLQLSQGQAVKGNQLLPVSLVKRKTTLAPNTQTASPRALADSLMQLARQVSRLESGQDFADFGTTIKQDFRLLGQTSVDRLLQLSQGQAVKGNQLLPVSLVKRKTTLAPNTQTASPRALADSLMQLARQVSRLESGQDFADFGTTIKQDFRLLGQTSVDRLLQLSQGQAVKGNQLLPVSLVKRKTTLAPNTQTASPRALADSLMQLARQVSRLESGQDFADFGTTIKQDFRLLGQTSVDRLLQLSQGQAVKGNQLLPVSLVKRKTTLAPNTQTASPRALADSLMQLARQVSRLESGQDFADFGTTIKQDFRLLGQTSVDRLLQLSQGQAVKGNQLLPVSLDLVLKGLRVLLVEGNDPQGTASMYHGWVPDLHIHAEDTLLPFYLGEKDDVTYAIKPTCWPGLDIIPSCLALHRIETELMGKFDEGKLPTDPHLMLRLATETVAHDYDVIVIDSAPNLGIGTINVVCAADVLIVPTPAELFDYTSALQFFDMLRDLLKNVDLKGFEPDVRILLTKYSNSNGSQSPWMEEQIRDAWGSMVLKNVVRETDEVGKGQIRMRTVFEQAIDQRFSTGAWRNAPSIWEPGCMEIFERLNKPKLSKLFHVRPVTQGDVYRAETEEIPKIFQILWPIKHKKGAGGNEPSEQFSKTLFGESASGYLEIFKDFTGNRNIFRQYRGNEGQMRELQDQLEAEQYFSQQNEKYQVPQFDQSTIKNIESAKGLDVWDSWPLQNADGTVAEYNGYHVVFALAGSPKDADDTSIYMFYQKVGDNSIDSWKNAGRVFKDSDKFDANDPILKDQTQEWSGSATFTSDGKIRLFYTDYSGKHYGKQSLTTAQVNVSKSDDTLKINGVEDHKTIFDGDGKTYQNVQQFIDEGNYTSGDNHTLRDPHYVEDKGHKYLVFEANTGTENGYQGEESLFNKAYYGGGTNFFRKESQKLQQSAKKRDAELANGALGIIELNNDYTLKKVMKPLITSNTVTDEIERANVFKMNGKWYLFTDSRGSKMTIDGINSNDIYMLGYVSNSLTGPYKPLNKTGLVLQMGLDPNDVTFTYSHFAVPQAKGNNVVITSYMTNRGFFEDKKATLGDFADFGTTIKQDFRLLGQTSVDRLLQLSQGQAVKGNQLLPVSLVKRKTTLAPNTQTASPRALADSLMQLARQVSRLESGQDFADFGTTIKQDFRLLGQTSVDRLLQLSQGQAVKGNQLLPVSLVKRKTTLAPNTQTASPRALADSLMQLARQVSRLESGQDFADFGTTIKQDFRLLGQTSVDRLLQLSQGQAVKGNQLLPVSLVKRKTTLAPNTQTASPRALADSLMQLARQVSRLESGQDFADFGTTIKQDFRLLGQTSVDRLLQLSQGQAVKGNQLLPVSLVKRKTTLAPNTQTASPRALADSLMQLARQVSRLESGQDFADLGTTIKQDFRLLGQTSVDRLLQLSQGQAVKGNQLLPVSLVKRKTTLAPNTQTASPRALADSLMQLARQCLEPRPLSPVFFVPLMFEFQGS

SEQ ID NO: 10333 - protein, 149 aa, Homo sapiens; identical to SEQ ID NO: 8286
  DOMAIN (33)..(55): Globins profile domain identified by eMATRIX, accession number BL01033A, p-value=3.250e-20, raw score of 16.94

SEQ ID NO: 10334 - protein, 193 aa, Homo sapiens
  DOMAIN (36)..(58): Globins profile domain identified by eMATRIX, accession number BL01033A, p-value=3.250e-20, raw score of 16.94
  misc_feature (1)...(193): Xaa = X or * as defined in Table 2
GIPQTQREPTMVLSPADKTNVKAAWGKVGAHAGEYGAEALERMFLSFPTTKTYFPHFDLSHGFCPGLRATGKKVADALTNAVAHVDDMPNALSALSDLHAHKLRVGPGSTFKLLSHLPCWXTLGRPPSPAEFQPLAVARLPWEKFPGLFVEAPLLDLQITFKVGSFGWPLFFCPFGPPPSPSSPFLHPYPRGL

SEQ ID NO: 10335 - protein, 192 aa, Homo sapiens
EPRLRKAGGLLSRSRQNDQEGREGAQGWPAYGPARGVVPQPWVQTGTWQGNTGQRVPQLPPHPPPIHLVSRHRGKLRHGFLRPMPEPRGLESGKTGQCSGSCSMYVTMRAKRPWEGGHDTLTQQGGCRSSVCGRRAHEALRPRVWCGEGPQWTWCAVCPNRSAPGAGLADRQHPGESRAWGETRLGEAGGAE

SEQ ID NO: 10336 - protein, 131 aa, Homo sapiens
  DOMAIN (104)..(129): Serpins proteins domain identified by eMATRIX, accession number BL00284E, p-value=3.864e-20, raw score of 19.15
QTPEKRHKSCPGGLHFLSRSINLHFPKLSISGTYKLKRVLRNLGITKIFSNEADLSGVSQEAPLKLSKAVHVAVLTIDEKGTEATGPPHLEEKAWSKYQTVMFNRPFLVIIKDDITNFPLFIGKVVNPTQK

SEQ ID NO: 10337 - protein, 709 aa, Homo sapiens
  DOMAIN (495)..(537): Serpins proteins domain identified by eMATRIX, accession number BL00284C, p-value=4.000e-25, raw score of 28.56
NTKLDQAQQAPEDHYPISLLLPSHMAIGLLMAQEGHCKDSSAMGEEAHHPLTPATPPFPPLSPDWGHMQPDFFVPVAVPAVFRGPPQLQCHGRRLFLNSPCAQKSSSGLVVEPGLSRTLLEMVKLTSMRGQFLEAQIPTGISLTLQYQLYQKQTNKNMSYSFVLFLKWVALGQGRRAGYPSLEDADSRRFNGSRSFLITVIGITLTVEIVTSGMMKGTRVRWSGAGNEGMMGLEEGRNERSVKEAPPRRAVEAQPKDRTWDVGKGQGTEGEGRGLEVEGQQHQGSEPGTIPFSVSWGVLLLAGLCCLVPSSLVEDPQEDAAQKTDTSHHDQGDWEDLACQKISYNVTDLAFDLYKSWLIYHNQHVLVTPTSVAMAFAMLSLGTKADTRTEILEGLNVNLTETPEAKIHECFQQVLQALSRPDTRLQLTTGSSLFVNKSMKLVDTFLEDTKKLYHSEASSINFRDTEEAKEQINNYVEKRTGRKVVDLVKHLKKDTSLALVDYISFHGKWKDKFKAERIMVEGFHVDDKTIIRVPMINHLGRFDIHRDRELSSWVLAQHYVGNATAFFILPDPKKMWQLEEKLTYSHLENIQRAFDIRSINLHFPKLSISGTYKLKRVPRNLGITKIFSNEADLSGVSQEAPLKLSKAVHVAVLTIDEKGTEATGAPHLEEKAWSKYQTVMFNRPFLVIIKEYITNFPLFIGKVVNPTQK

SEQ ID NO: 10338 - protein, 123 aa, Homo sapiens
  DOMAIN (76)..(106): Electron transfer flavoprotein beta-subunit proteins domain identified by eMATRIX, accession number BL01065C, p-value=2.047e- 16, raw score of 16.45
  misc_feature (1)...(123): Xaa = X or * as defined in Table 2
PRVRVRVDLVSGWGGKMVDLFVLVTVKRVIDYAVKILVKPDWTGVVSDGVKHSLNPFCDIAVDEAVLLKEKKLVKEGIAVCCGPAQCQETNRTALGMGAHRGIHVEVSPXXAQRLCPLQVARG

SEQ ID NO: 10339 - protein, 404 aa, Homo sapiens
MRRNKPRQRGVREARPAGGAGPGWRGARCSGAGEGGGGERRGSPPAALALAPASGPRRNFPPDARCLIYQQIHQGAFLLAGSASLSAVTGVPEGEARFTEDYCPEEKMFGFHKPKMYRSIEGCCISGAKSSSSRFTDSKRYEKDFQSCFGLHETRSGDICNACVLLVKRWKKLPAGSKKNWNHVVDARAGPSLKTTFEPKKVKTLSGNRIKSTQISKLQKEFKRSNSDAHSTTSSASPAQSPCYSNQSDDGSDTEMASGSNRTPVFSFLDLTYWKRQKICCGIIYKGRFGEVLIDTHLFKPCCSNKKAAAEKPEEQGPEPLPISTQEWTECPDLSLVVSWRPPLSSLPAGCSLHGLAADWTTDMITVTTSKCREPSCQQEGSFQRRKAFPKRLPKMAEVQVLLL

SEQ ID NO: 10340 - protein, 89 aa, Homo sapiens
  DOMAIN (43)..(79): RNA polymerases L / 13 to 16 Kd subunits proteins domain identified by eMATRIX, accession number BL01154B, p-value=5.500e- 36, raw score of 24.55
GGGGPLGSGRNGGGSMNAPPAFESFLLFEGEKQLLKDPQVLFAGYKVPHPLEHKIIIRVQTTPDYSPQEAFTNAITDLISELSLLEERF

SEQ ID NO: 10341 - protein, 45 aa, Homo sapiens
  misc_feature (1)...(45): Xaa = X or * as defined in Table 2
SNTHRVPTFTDAWEVEMVTSLSLQSFLLLPHIHCLKLQXDPLHSP

SEQ ID NO: 10342 - protein, 72 aa, Homo sapiens
LTVLQAVQEAWLGRPQETDNHGRRRRGSRHVWPCWSRRDRESEVGGLHAFKQPDPTSAHSISREQQGGSRPP

SEQ ID NO: 10343 - protein, 27 aa, Homo sapiens
  misc_feature (1)...(27): Xaa = X or * as defined in Table 2
KRLSLQSFLLLPHIHCLKLQXDPLHSP

SEQ ID NO: 10344 - protein, 101 aa, Homo sapiens
RTRGRTRGGDGGGHLGSGRNGGGSMNAPPAFESFLPLRGQRRITINKDTKVPNACLFTMNKEDHTLGNIIKSRACFPFAFCRDCQFPEASPATLPVQPAEL

SEQ ID NO: 10345 - protein, 162 aa, Homo sapiens
  DOMAIN (89)..(125): RNA polymerases L / 13 to 16 Kd subunits proteins domain identified by eMATRIX, accession number BL01154B, p-value=4.923e- 22, raw score of 24.55
GSGGGGGGHLGSGRNGGGSMNAPPAFESFLLFEGEKKISDAGCGGPRITINKDTKVPNACLFTINKEDHTLGNIIKSQRDLKDPQALFAGYKVPHPLEHKIIIRVQTTPDYSPQRAFTNRQSPDLISELSLLGGSAFRGGHKKTSQERNLSRGARGGLCSGL

SEQ ID NO: 10346 - protein, 887 aa, Homo sapiens
  DOMAIN (96)..(137): kw TRANSCRIPTASE REVERSE II ORF2 domain identified by eMATRIX, accession number DM01354I, p-value=1.000e-40, raw score of 15.55
MRQKVNKDIQELNSALHQVDLIDIYRTLHPKSTEYTFFSAPHLTYSKIDHLVSSKALLSKCKRTEIIRNCLSDHSATKLELRIKKLTQNRSTTWKLNNLLLNDYWVHNEMKAEIKMFFETNENKNTTYQNLWDTFKAVCRGKFIALNTHNRKQERSKIDTLTSQLKEPEKQDQTHSKASRRQEITKIRAELKEIETQKTLQKINESRSWFFEKINKIDRPLARLIKKEGEKNQIHTIKNDKGDLTTNPIEIQTTIREYYIHFYANTLENLEEMDKFLNTYTLLRLNQEEVESLNRRITGSEIEAIINSLPTKKSPGPDAEKAFDKSQQRFMLKTLNKLGIDGTYLKIIRAIYDKPIANIILNGQKLEAFPLKTGTRQGCPLSPLLFNIVLEVLARAIRQEKEIKGIQSGKEELKLSLFADDMIVYLENPILSAQNLLKLIGNFSKVSGYKINVQKSQAFLYTKNRQTESQIMSELPFTIASKRIKDLGIQLTRDVKDLFKENYKPLLEEIKEDTNKWKNIPCSWIGGINIVKIAILPKPCGKLKLDPFLTPYTKINSRWIKDLHVRPKNVKTLEENLGNTIQDIGMGKDFMSKTPKAMATKAKIDKWDLIKLKSFCTVKETTIRVNRQPTEWEKIFAIYSSDKGLISRIYNELKQIYKKKTNNPIKKWAKDMNRHFSKEDIYAAKRHMKKCSASLAIREMQIKTTMRYHLTPVRMATIKKSGNNRGYMTMLEQESFFLSLNIAYDSVLLPVILPVPPFGVPDFPQQVPGSSHWDWLDSECSPWRCSLTGRHLPVGANRHLIEVGAPLGRSFQRKDQAAIFAVLQPLLVIPRQTASGVDLRQPPTDLQEHNSSPAREENWTENEFDELTEVGFRRLVITKFSELKEDV

SEQ ID NO: 10347 - protein, 31 aa, Homo sapiens
MYSQPQANLGSLEHKLGRLHIRILGHGSGRL

SEQ ID NO: 10348 - protein, 484 aa, Homo sapiens
  DOMAIN (116)..(163): kw TRANSCRIPTASE REVERSE II ORF2 domain identified by eMATRIX, accession number DM01354V, p-value=1.000e-40, raw score of 12.97
MIISIDAEKAFDKIQQPFMLKTLNELVLEVLARAIRQEKEIKVIQLGKEEVKLSLFADDMIVYLENPIVSAQNLLKLISNFSKVSGYKINVQKSQAVLYTNNRQTESQIMSELPFTIASKRIKYLGIQLTRDVKDLFKENYKPLLNEIKEDTNKWKKILCSWAGRINIVKMATLSKVIYRFNAIPIKLPMTFFTELEKTTLKFIWNQKRACIAKSILSQKNKAGGITLPDFKLYYKATVTKTAWYWYQKRDIDQWNRTEPSEITPRIYNYLIFDKPEKNKQWGKDSLFNKWCWENWLAICRKLKLDRFLIPYTKINSRWIKDLNVRPKTIKTLEENLGITIQDIGMGKDFMSKTPKAVATKAKIDKWNLIKLKSFCTAKETTIRVNRQPTKWEKIFATYSSDKGLISGIYKELKQIYKKKTNNPIKKWAKDMNRPFSKEDIYAAKRHMKKCSPSLAIREMQIKTTMRYHLTPVRMAIIQKSGNN

SEQ ID NO: 10349 - protein, 788 aa, Homo sapiens
  DOMAIN (122)..(169): kw TRANSCRIPTASE REVERSE II ORF2 domain identified by eMATRIX, accession number DM01354V, p-value=1.000e-40, raw score of 12.97
ETLIDWCDEKELNLILTTGGTGFAPRDVTPENSAVNPSGPGLFLVVLEVLARAIRQEKEIKGIQLGKEEVKLSVSADDMIVYLENPIVSAQNLLKLISNFSKVSGYKINVQKSQAFLYTNNRQRAKSIKYLGIQLTRDVKDLFKENYKPLLKEIKEDTNKWKNIPCSWVGRINIVKMAILPKVIYRFNAIPIKLPMPFFTELEKTTLKFIWNQKRARIAKSILSQKNKAGGITLPDFKLYYKATITKTAWYWYQNRDIDQWNRTEPSEITPHIYNYLIFDKPEKNKQWGKDSLFNKWCWENWLAVCRKLKLDPFLTPYTKINSRWIKDLNVRPKTIKTLEENLGITIQDIGMGKDFMSKTPKAMATKAKIDKWDLIKLKSFCTAKETTIRVNRQPTKWEKIFATYSSDKALISRIYNELKQIYKKKTNNPIKKRAKDMNRHFSKEDIYAARKHMKKCSPSLAIREMQIKTTMRYHLTPVRMAIIKKSGNNSHTPAATGCMAWRENLCIWERNSTVIVRRSIGHSAALSQQKATPGLTQLNTAHRGTIWTSPTQRGTTNPCDWKESSGWHQVNAALGRSFQRKELAAIFAVLQPLLVIPRKTGSRVDIQQTPADLQQRGLTVRRKTNEQRGIASTSTKRISTQKPHPKVTNIKEQSEYYKYLYANKLENLEEIVKFLDTYTPPRLNQEEVKSLTRPITSSEVEAVINSIPTKKSPEPDRFTAEFYQKYKQELVPFVLKLFQTTEKEGILLNLLYEASIILIPKPERDTTKKISGQYPRGTWMHKSSIKY

SEQ ID NO: 10350 - protein, 456 aa, Homo sapiens
  DOMAIN (30)..(77): kw TRANSCRIPTASE REVERSE II ORF2 domain identified by eMATRIX, accession number DM01354V, p-value=1.000e-40, raw score of 12.97
MQNQEQKSQAFLYTNNRQTESQIMSELPFTIASKRIKYLGIQLTRDVKDLFKENYKPLLKEIKEDTKKWKNIPCSWVGRINIVKMAILPKVIYRFNAIPIKLPMTFFTELEKTTLKFIGNQKRAHIAKSILSQKNKAGGITLPDFKLYYKATVTKAPWYWYQNRDIDQWNRMEPSEITPHMYNYLIFDKPEKNKQWGKDSLFNKWCWENWLAICRKLKLDPFLTSYTKINSRWIKDLNVRPKTIKTLEENLGITIQDIGMGKDFMSKTPKAMATKAKIDKWDLIKLKSFCTAKETTIRVNRQPTKWEKIFETYSSDKGLISRIYNELKQIYKKKTNNPIKKWAKDMNRHFSKEDIYAAKKHMKKCSPSLAIREMQIKTTMRYHLTPVRMAIIKKSGNNRSEAADLRGECYSSEGGTSGVVHSSRWARALAGSGVKLQTFVVSVTAHKGSVDPKSEQ

SEQ ID NO: 10351 - protein, 453 aa, Homo sapiens
  DOMAIN (64)..(104): kw TRANSCRIPTASE REVERSE II ORF2 domain identified by eMATRIX, accession number DM01354Y, p-value=1.000e-40, raw score of 10.69
VKGDRFGALRFNDCPAGIKLPMTFFTELEKTTLKFIWNQKRARIAKSILSQKNKAGGSTLPDFKLYYKATVTKTAWYWYQNRDIDQWNRTGPSEITPHTYNYLIFDKPEKNKQWGNDSLFNKWCWENWLAICRKLKLDPFLTPYTRINSRWIKDLNVRPKTIKTLEENLGITIQDIGMGKDFMSKTPKAMATKDKIDKWDLIKLKSFCTAKETTIRVNRQPTKWEKIFATYSSDKGLISRIYNELKQIYKKKTNNPIKKWAKDMNRHFSKEDIYAAKRHMKKCSSSLAIREMQIKTTMRYHLTPVRMAIIKKSGNNRCWRGCGEIGTLLHCWWDWKLVQPLWKSVWRFLRDLELEIPFDPAIPLLGIYPNDYKSCCYKDTCTRMFIVALFTIAKTWNQPKCPTMIDWIKKMWHIYTMEYYAAIKNDEFMSFVGTWMKLEIIILSKLLQEQKTK

SEQ ID NO: 10352 - protein, 629 aa, Homo sapiens
  DOMAIN (37)..(83): kw TRANSCRIPTASE REVERSE II ORF2 domain identified by eMATRIX, accession number DM01354O, p-value=1.000e-40, raw score of 8.73
MDKFLDTYTLPRLNQEEVESLNRPITGSEIVAIINSLPTKKSPGPDGFTAEFYQRYKEELVPFLLKLFQSIEKEGILPNSFYEASIILIPKPGRDTTKIENFRPISLMNIDAKILNKILANRIQQHIKKLIHHDQVGFTPGMQGWFNICKSINIIQHINRTKDKNHMIISIDAEKAFDKIQQHFMLKTLNKLGIDGTYLKMIRTIYDKPTANIILNGQKLEAFPLKTGTRQGCPLSPLLFNIVMELLARAIRQEKEIKGIQLGKEEVKLSLFADDMIRIKYLGIQLIRDMKDLFKENYKPLLNEIKEDTNKWKNIPCSWVGRINIVKMAILPKVIYRFNAIPIKLPMTFFTELEKTTLNFIWNQKRARTAKSILSQKNKARGIMLPDFKLYYKATVTKTAWCWYQNRDIDQWNRTEPSEITPHIYNYLIFDKPDKNKQWGKDSLFNKWCWENWLAICRKLKLHPFLTPYTTINSRWIKDLNVRPKTIKTLEENLGNTIQDIGMGKDFMSKTPKAMATKAKIDKWDLIKLKSFCTAKETTISVNRQPTKWEKIFATYSSDTGLISRIYNELKQIYKKKTNNPINKWAKDMNRHFSKEDIYAAQKHMKNAHHHWPSEKCKSKHNEIPSHTS

SEQ ID NO: 10353 - protein, 891 aa, Homo sapiens
  DOMAIN (149)..(194): kw TRANSCRIPTASE REVERSE II ORF2 domain identified by eMATRIX, accession number DM01354N, p-value=1.000e-40, raw score of 13.17
MKAEIKMFFEINENKDTTYQNLWDAFKAVCRGKFIALNAHNRKQERPKIDTLTSQLKELEKQEQTHSKASRRQEMTKIRAELKEIEIQKTLQKINESRSWFFERINKIDRPLARLIKKKREKNQIDAIKNDKGDITTDPTEIQTTIREYYKHLYANKLENLEEMDKFLDTYTLPRLNQEEVESLNRPITGPEIVAIINSLPTKRSPGPDGFTAEFYQRYKEELVPFLLKLFQSIEKEGILPNSFYEASIILIPKPGRDTTKKENFRPISLMNIDAKILNKILANRIQQHIKKLIHHDQVGFIPGMQGWFNIRKSINVVQHINRTKHKNHMIISIDAEKAFDKIQQPFMLKTLNKLSIDGTYLKIIRATYDKPTANIILNGQNLEAFPLKTGTRQGHPLSPLLFNIVLEVLARAIRQEKEIKAQNLLKLISNFRKVSVYKINVQKSQAFLYTNNRQTESQIMRELPFTIASKRIKYLGIQLTRDVKDLFKENYKPLLNEIKEDTNKWKNIPCSWIGRINIVKMAILPKVIYRFNAIPIKLPTTFFTELEKTILKFIWNQKRAHIAKTILSQKNKAGGIMLPDFKLYYKATVTKTAWYWYQKRDIDQWNRIELSEIIPHIYNHLIFDKPDKNKKWGKDSVFNKRCWENWLAICRKLKLDTFLTPYTKINSRWIKDLHVRPKAIKTLEENLGITIQDIGMGKDFTSKTPKAMATKAKIDKWDLIKLKSFCTAKETTIRVNRQPTKWEKIFAIYSSDKGLISRIYKELKQIYKKKTNNPIKKWAKDMNRHFSKEDIYAANRHMKKCSSSLAIREMQIKTTMRYHLTPVRKAIIKKSGNNRCWRGCGEIGTLLHCWWDCKLVQPLWKTVWQFLRDLELEIPFYPAIPLLGIYPKDY

SEQ ID NO: 10354 - protein, 1015 aa, Homo sapiens
  DOMAIN (106)..(161): kw TRANSCRIPTASE REVERSE II ORF2 domain identified by eMATRIX, accession number DM01354Q, p-value=1.000e-40, raw score of 9.23
MDKFLNTYTLPRLKQEEVESLNRPITGSDIEAIINSLPTKKSPGPDGFTAEFCQRYKEELEKEGILPNSFYEASIILIPKPASDTTKKENFRPISLMNINAKILNKILAKQIRQHIKKLIHHDQVGFIPGMHGLFNICKSVNIIQHINRTNDKNHMIISIDAEKPFDKIQQHFMLKTLNKLAQNLLKLIGNFSKVSGYKINVQKSQAFLYTNNRQTESQIMNEFPFTIASKRIKYLGIQLTRDVKDLFKENYKALLNEIKEDTNKWKNIPCSWEKTTLKFIWNQKRAHIAKSIISQKNKAGGITLPDFKLYCKATVTKTAWYWYQNRDIDQWNRTESSEIMPHIYNHLIFDKPDKKKKWGKDSLFNKWCWENWLAICRKLKLDPFLTPDTKINSRRIKDLNVRPEMIKTLEENLGNTIQDIGMGKDFMSKTPKAMATKAKIDKWDLIKLKSFCTAKETTIRVNRQPTEWEKIFAIYSSDKGLISRIYNELKQIYKKKTNNPIEKWAKDMNRHFSKEDIYAAKKHMKKCSSSLVIREIQIKTTMRYHLTPVRMAIIKKSGNNRCWRGCGEIGTLLHCWWDCKLVQPLWKSVWRFLRDLELEIPFDPAIPLLAAPSLPSGLRSPSKSSPSPPSRCTLVIILLHVFWDIVFFDGCEKKRWYILLIVLLTRLLVSACTFTEGYTVGFSTFEALRLGLSRYWLPCSSACRRPIVGLQLVMINSGNFQVIAMEGTVASECCHGNGKLTWHRPVLSVCSFSRCTVQAAGGSAILEDGDPLLTAPLGSTPQAAVCRGPRGRELRAAPADSHLFQRDLWPFNKVIVHGEKGSNQTSQGLLNTGSEMTIVLENPKYHSGPPVRVSPDGGQVIIEVLADPSYTGPTALNNVFFAFQCNFYFDHIPENCGFSDPSDPQNLQKGEGCPSLVRASTAPPQEKATEQPLLCKTTESPFGMTVGPCTDETLDHGAPSKHVPGTAHNELALLDLRVIKSAGSAAVHHKLKVLHWRSSLSNNKGTGRLYEQVA

SEQ ID NO: 10355 - protein, 714 aa, Homo sapiens
  DOMAIN (39)..(82): kw TRANSCRIPTASE REVERSE II ORF2 domain identified by eMATRIX, accession number DM01354T, p-value=1.000e-40, raw score of 9.48
MLKTLNKLRIDGTYLKIIRAIYDKSTANIMLNGQKLEAFPLKTGTRQGCPLSTLLFNIVLEVLARAIRQEKEIKGIQLGKEEVKLSLFADDMIVYLENPIVSAQNLLKLIGNFSKVSGYKINVQKSQAFLYTNNRQTESQIMSELPFTIASKRIKYLGIHLIRDVKDLFKENYKPLLNEIKEDTNKWKNIPCSWIGRINIVKMAILPKVIYRFNAIPIKLPMTFFTELEKTTLKFIWNQKRARIAKSVLSQKNKAGGITLPDFKLYYKATVTKTARYWYQNRDIDQWNRTEPSEIMPHIYKYLIFDKLEKNKKWGKDSLFNQWCWENWLAICRKLKLDPFLTPYTTINSRWIKDLNVRSKTIKTLEENLRIAIQDTGMGKDFMSKTPKAMATKAKIDKWDLIKLKSFCTAKETTIRVNRQPTKWEKIFATYSSDKGLISRIYNELKQIYKKKTNNPIKKWAKDMNRHFSKEDIYAAKKHMKKCSPSLAIREMQIKTTMRYHLTPVRMAIIKKSGNNSTFDFGQHEFELHRSTYTRIVFSKITPILEVLARAIRQEKEIKGIQLGKEEVKLSLFADDMIVYLENPIVSAQNLLKLIGNFSKVSGYKINVQKSQAFLYTNNRQTESQIMSELPFTIASKRIKYLGIQLTRDVKDLFKENYKPLLNEIKEDTNKWKNIPCSWVGRINIVKMAILPKVIYRFNAIPIKLPMTFFTELE

SEQ ID NO: 10356 - protein, 516 aa, Homo sapiens
  DOMAIN (160)..(207): kw TRANSCRIPTASE REVERSE II ORF2 domain identified by eMATRIX, accession number DM01354V, p-value=1.000e-40, raw score of 12.97
MRFKEKIHLHNIKEPSEAASADGGAVASYPDLAKIVDEGRYKAEVMQLRCGWRAPASDCVHSVAVVGVDSVLEVLARAIRQEKEIKGIQLGKEEVKLSLFADDMIVYLENPTVSAQNLLKLISNFSRVSGYKINVQKSQAFLYTNNKQTESQIMSELPFTIASKTIKYLGIQLTRDVKDLFKENYKPLLNKIKEDTNKWKNIPCSWIGRINIVKMAILPKVIYRFNAIHIKLPMTFFTELEKTTLKFIWNQKGVHIAKSILSKKNKAGGIMLPHFKLYYKATVTKTAWYWYQNRYTDQCNRTEPSEIIPHIYNHLMFDKPDKNKKWGKDSLFNKWCWENWLAICRKLKLDPFLTPYTKINSRWIKDLNVRPKPIKTLEENLGITIQDIGMGKDFMSKTPKAIATKAKIDKWDLIKLKSFCTAKETTIGVNRQPTELEKIFAIYSSDKGLISRIYKELKQIYKKKNNPIKKWVKDMNRHFSKEDIYAVNRHMKKCSSSLVIREMQIKTTMRYYLTPV

SEQ ID NO: 10357 - protein, 485 aa, Homo sapiens
  DOMAIN (128)..(175): kw TRANSCRIPTASE REVERSE II ORF2 domain identified by eMATRIX, accession number DM01354V, p-value=1.000e-40, raw score of 12.97
GLSGDLLGAHQLPDVLCGVQPLPDLLLPPQNLLALQSLQDDLLWALDPAAAAPWAMDRGAATQWAVGPVVSDPWVMEAVASLPSAMDLDSAAQPTWLLGAASLLVTDQPMDQPSADQLAEFPDLLSKVSQSLRIKYLGIKLTRNVKDLFKENYKPLLNEIKEDTNKWKNIPCSWVGRINIVKMAILPKVIYRFNAIPIKLPMTFFTELENTTLKFIWNQKRACIAKSILSQKNKAGSIMLPDFKLYHKATVTKTAWYQYQNRDIDQWNGTEPSEIMSHIYNYLIFDKPEKNKQRGKDSLFSKWCWENWLAICRKLKLDPFLTPYTKINSRWIKDLNVRPKIIKTLEENLVNTIQDIGMGKDFMSKTPKAMATKAKIDKWDLIKQKSFCTAKETTIRVNRQPTEWEKIFAIYSSDKGLISRIYKELQQIYRKKTNNPIKKWAKDMNRHFSKEDIYAANRHMKKCSSSLAIREMQIKTTMRYHLTPV

SEQ ID NO: 10358 - protein, 157 aa, Homo sapiens
  misc_feature (1)...(157): Xaa = X or * as defined in Table 2
DGRRKEKWHKVERRHRPYLLSSLSQHRWXTVTNFGEISGTIAIEVDEGTYIHALNNGLFTLGAPHKERIALKPGYGKYLSINSDELVVGRSDAIGPREQWEPVFQNQEVRNGGPAEMGEEKRNGTKWREDTDHTSFPLFPSTGGQPKAHSNWRKVCH

SEQ ID NO: 10359 - protein, 676 aa, Homo sapiens
  DOMAIN (57)..(100): kw TRANSCRIPTASE REVERSE II ORF2 domain identified by eMATRIX, accession number DM01354T, p-value=1.000e-40, raw score of 9.48
MIISIDAEKAFDKIQQPFMLKTLNKLGIDGRYLKIIRAIYDKPTANIILNGQKLEAFPLKTGTRQGCPLSPLLFHIVLEVLARAIRQEKEIKGIQLGKEKVKLSLFPDDMVVYLENPIISAQNLLKLISNFSKVSGYKINVQTSQAFLYTNNRQTESQIMSELPFTTASKRIKYLGIQLTRDVKDLFKDNYKPLLKEIKEDTNKWKNIPCLWVGRINIVKMAILPKVIYRFNAIPIKLPMTFFTELEKTTLKFIWNQKRARIAKSILSQKNKAGGITLPDFKLYYKSTVTKTAWYWYQNRDIDQWNRTEPSEIMLHISNYLIFDKPDKNNQWGKDSLFNKWCWENRLAICRKLKLDPFLTPYTKINSRWIKDLNVRPKTINTLQENLGNTIQDIGMGKDFMSKTPKAMATKAKIDKWDLIKLKSFCTAKETTIRVNRQPTEWEKIFAIYSSDKGLISRIYNELKQIYKKKTNNPIKKWVKDMNRHFSKEDIYAAKKHMKKCSSSLATREMQIKTTMRYHLTPVRMAIIKKSGNNRPLWPTMPGDSQRGDKLRDGGTPGKDHFPTPFAFQAPIHPTESHLHHSPSLPAFTILQVHGFECTAAKQTSHTPVASPTGESGNFLASVTSRLSGGNVKIILDWKMRIMNKEDYGTISVIRRSYNRTLKQDGGSKAEENKQR

SEQ ID NO: 10360 - protein, 515 aa, Homo sapiens
  DOMAIN (117)..(164): kw TRANSCRIPTASE REVERSE II ORF2 domain identified by eMATRIX, accession number DM01354V, p-value=1.000e-40, raw score of 12.97
SNISLYSVVSLRPLPADYVPSIVMLPGTCQTQDVEVSEETVEPSDELIEYDSPEQLNEQLVTLSLLPESRWKNLLNLDVIKRALELRYNINVQKSQAFLYTNNRQTESQIMSELPFTMASKRIKYLGIQLTRDVKDLFKENYKPLLKEIKEDTNKWKNIPCSWVGRINIVKMAILPKVIYRFSAIPIKLPMTFFTELEKTTLKFIWNQKRARIVKSILSQKNKAGGTTLPDFKLYYKATVTKIAWYWYQNRDIDQWNRTEPSEIMPHIYNYLIFDKPEKNKQWGKDSLFNKWCWENWLAICRKLKLDPFLTPYTKINSRWIKDLNVRPKTIKTLEENLGITIQDIGMGKDFMSKTPKAMATKPKIDKWDLMKLKSFCTAKETTIRVNRQPTKWEKIFATYSSDKGLISRIYNELKQIYKKKTNNPIKKWAKDMNRHFSKEDIYAAKKHMKKCSPSLAIREMQIKTTMRYHLPPVRMAIIKKSGNNRCWRGCGEIGTLLHCWRDCKLVQPLRKTVW

SEQ ID NO: 10361 - protein, 647 aa, Homo sapiens
  DOMAIN (303)..(343): kw TRANSCRIPTASE REVERSE II ORF2 domain identified by eMATRIX, accession number DM01354Y, p-value=1.000e-40, raw score of 10.69
NYPDQHFPIFHGIKEKSPRTGSWLIELTSERPFKTKSQCQDPVYPSCHYSQSSLFMDPGYNEPPEIAPVNEAVGIQIRGPGAASCARFCEQLATACRMLEFLARAIRQEKEIKGIQLGKEEVKLSLFADDMIVYLENPILSAQNLLKLISNFSKVSGYKINVQNSQAFLYTNNRQTDSQIISELPFAIASKRIKYLGIQLTRDVKNLFKENYKPQLSEIKEDTKKWKNIPCLWVERIYIVKTAIQAKVIYRFNAIPIKIPMTFFTELEKTTLNFIRNQKRARITKSILSQKKKAGGITLPDFKLYYKATVTKTAWYWYQNRDIDQWNRTEPSEITPHIYNYLIFDKPEKNKQWGKDSLFNKCYWENWLAICRKLKLDPFLTPYTKINSRWIKELNVRPKTIKTLEENLGITFQDIGMGKDFMSKTTKAMATKAKIDKWDLIKLKSFCTAKETTIRVNRQPTKWEKIFATYSSDKGLISRIYNELKQIYKKKTNNPIKKWAKDMNRHFSKEDIYAAKKHMKKCSPSLAIREMQTKTTMRYRLTPVRMAIIKKSGNNSLLITIREYYKHLYANKLENLEEMDKFLDTYTLPKLSEEEVESLDMLSFYTTGSKDCSPNFDTKNALLMYTPVKTRTKIQLQIRTLHKALTV

SEQ ID NO: 10362 - protein, 708 aa, Homo sapiens
  DOMAIN (116)..(163): kw TRANSCRIPTASE REVERSE II ORF2 domain identified by eMATRIX, accession number DM01354V, p-value=1.000e-40, raw score of 12.97
MAQELRDECTSLSSRFDQLEERVSEMEDHMNEMKREEKFRKKGIKRNEQSLQEIWDYVKRPNLRLIGVPETQNLLKLISNFSKVSGYKINVQKSQAFLYTNNRQTESQIISELPFTIASKRIRYLGIQLTRDVKDLFKENYKPLLNEIKEDTHKWKNIPCSWIGRINIVKMAILPKVIYRFNAMPIKLPLTFFTELEKTTLKFIWNQKRARIAKSILSQKNKTGGITLPDFKLYYKATVTKAAWYWYQNRDIDQWNRIEPSEIIPHIYNYLIFDKPEKNKKWGKDSLFNKWCWENWLAICRKLKLDPFLTPYTKINSRWIKDLHARSKTIKTLEENLGNTIQDIGIGKDFMSKTPKAMATKAKIDKWDLIKLKSFCTAKETTIRVNRQPKEWEKIFAIYSSDKRLISRIYEEIKQIYKKKTNNPINKWAKDMNRHFSKEDIYAANRHMKKCSSSLVIREMQIKTTMRYHLTPVRMVIIKKSGNNRSLFHVIPKTCELGSLPRLAHEGHLQVTRGVQKWGHQLEFGPRVWIPKQESCSMALFCYAAEGLYFGSKGSQGKDKLCGCGTFARFNILQEDDLSLRVVRLEDKERGSGENGIHTYNTCELKQLIFIMKKSTKDGAAWPLPHAGSCRCKGRTTANGTEKVPACIIQEPEDRPAPPTTATASACGHCLGPEDKPVSPIIKATCTQACHPGICLLQPALLHTIGEA

SEQ ID NO: 10363 - protein, 750 aa, Homo sapiens
  DOMAIN (80)..(135): kw TRANSCRIPTASE REVERSE II ORF2 domain identified by eMATRIX, accession number DM01354Q, p-value=1.000e-40, raw score of 9.23
MGKFLDTHTLARLNQEEIESLNRPITGSEIVAIINTLPTKKSPGPDGFTAKFYQSRAETQPKKNFRPISLMNIDAKILNKILANQIQQHIKKLIHHDQVGFIPGMQGWFNICKSINVIQHINRTKDKNHMIISIDAEKAFDKIQQPFMLKTLNKLGTDGTYLKIIRAIYDKPTANIILNGQKLEAFPLKTGTRQGCPLSPLLFNIMLEVLARAISQEKEIKGIQLGKEEVKLSLFADDMIVYLDNPVVSAQNLLKLISNFSKVSGYKINVQKSQAFLYTNNRQTESQIMRELPFTIASKRIKYLGIQLTRDVKDLFKENYEPLLNEIKEDTNKWKNVPCSWVGRINIVKMAIVPKVIYRFNVIPILLPMTFFTELEKTTLKFIWNQKRARIAKSILSQKNKAGGITLPDFKLYYKATVTKTAWYWYQNRDIYQWNRTQPSEITPHIYTYLIFDKPEKNKQWGKDSLFNKWCWENWLAICRKLKLDPFLTPYTKINSRWIKDLNVIPKTIKTLEENLGITIQDIGMGQDFMSKTPKAMATKAKIDKWDLIKLKSFCTAKETTIRVNRQPTKWEKIFATYSSDKGLISRMYNELKQIYKKKTNNSIKKWAKDMNRHFSKEDIYAAKKHMKKCSPSLAIREMQIKTTMRYHLTPVRMVIIKKSGNNSLGDKARPCLKKRKEKKMFLTVGTKSLEEKAEGIRGTSSSLVKEYLKVSKILPALEYWTPSSSVLELGLALLAPQPADGRLWDLVIL

SEQ ID NO: 10364 - protein, 827 aa, Homo sapiens
  DOMAIN (326)..(373): kw TRANSCRIPTASE REVERSE II ORF2 domain identified by eMATRIX, accession number DM01354V, p-value=1.000e-40, raw score of 12.97
GKYYKLSSGTAPTCVSLGWGLARGDSAAPALGSRTSACAPCSHGTWKLSLEPSDRLSPCDRSSEEAHTHAPHRLLALVASLPWSRLPLLAPQSHSEAEATSQPTGVENHHQKTRYVKAGGPVICRSLPESRGFLWASEGRKCMLIGSWAAMGRLRKSTISSRFGPQTLAGTGRPQAIPVLKKHSDAVLLGVCFLKLLHQHHQELGENADSQTLPQTHWEFILSEDYNKMTPVKNYQVLEVLARAMRQEKQIKSIQLGKEEVKLSVFADDMIVYLENPIVSAQNLLKLISNFSKVSGYKINVQKSQAFLYTNNRQTESQIISELPFTIPSKRIKYLGIQLTRDVKDLFKENYKPLLNEIKEDTNKWKNIPCSWVGRINIMKMAILPRVIYIFNAISIKLPMTFFTELEKTTLKFIWNQKRARIAKTILSQKNKAGGITLPDFKLYYKATVTKTAWYWYQNRGVDQWNRIEPSEIIPHIHNHLIFDKPDKNKKWGKDSLFTKWCWENWLAICRKLKLDPFLTPYTKINSTWIKDLNVRPKTIKTLEENLGITIQDIGMGKDFMSKTPKAMATKAKIDKWDLIKLKSFCTAKETTIRVNRQPTEWEKIFTIYPSDKGLIPRIYKELKQIYKKKSNNPIKKWAKDINRHFSKEDIYAANRHMKKCSSSLVIREMQNKITIRYHLTPVRMAIIKKSGNNRDMDEAGNHHSEQTIARTENQAPYLLTHRWELNNENTWTQVEEHHTLGPIVGVICRKVFPGNSGPSKPSGLHFSQPLPQVTSVVAKITIVPWEMKLIAMGVQDELNIAFHKNHLLMNDTTIHMTPYIQPAPKS

SEQ ID NO: 10365 - protein, 874 aa, Homo sapiens
  DOMAIN (37)..(83): kw TRANSCRIPTASE REVERSE II ORF2 domain identified by eMATRIX, accession number DM01354O, p-value=1.000e-40, raw score of 8.73
MDKFLDTYTLPRLNQEEVECLNRPITGAEIVAIINSLPTKKSPGPDGFTAEFYQRYKEELVPFLLKLFQSIEKEGILPNSFYEASIILIPKPGRDTTKKENFRPISLMNIDAKILNKILADRIQQHIKKLIHHDQVGFIPGMQGLFNIRKSINVIQHINRAKDKNHMNISIDAEKAFDKIQQHFMLKTLNKLADKHFSKVSGYKINVQKSQAFLYPNNRQTESQIMSELPFTIASKRIKYLGIQLTRDVKDLFKENYKPLLKEIKEDTNKWKNIPCSWVGRINIVKMAILPKVIYRFNAILIKLPMPFFTELEKTTLKFIWNQKRARITKSILSQKNKAGGITLPDFKLYYKATVTKTAWYWYQNRDIDQWNRTEPSEIMPHIYNYLIFDKPEKNKQWGKDSLFNKWCWENWLAICRKLKLNPFLTPYTKINSRWIKDLNVRPKTIKTLEENLGITIQDIGMGKDFMSKTPKAMATKDKIDKWDLIKLKSFCTAKETTIRVNRQPTKWEKIFATYSSDKGLMSRIYNELKQIYKKKTNNPIKKWAKDMNRHFSKEDIYAAKKHMKKCSPSLAIREMQIKTTMRYHLTPVRMAIIKKSGNNSKLPFEPSRNKRVMPEPCAHTILSSLARPASKMHSPPLSMEPSAGPGGSQNFPNEEAEDRPRTLNFEGSETWALTGPDARYFNYTREARGENSLVSGGCRPLAAGRARASTSGWAAKRVGTLQGGPLTWAMPAPISPPPMTVTCLTIIFLAEAEAVDEEDTERMNCLVTKAMVWQRRRQRGDPGREDARGGQPRKARLWGRGPTRPCSPRAPGVPVTPQGGGGASSPALPIGPGCNVPALSGYTRAGSQLSAAGARVSAGLRPAEQRDLAAGVL

SEQ ID NO: 10366 - protein, 660 aa, Homo sapiens
  DOMAIN (88)..(118): kw TRANSCRIPTASE REVERSE II ORF2 domain identified by eMATRIX, accession number DM01354M, p-value=2.446e-23, raw score of 12.50
  misc_feature (1)...(660): Xaa = X or * as defined in Table 2
YPESTMNSNKFTRKKQTTPSKSGXRIXTDTSQKKTFMQPKDTXKNAQHHWSLEKCKSKPQXDTISHQLEWRSLKSQDRKDXQSTLLAILIKKKGQKNQIDTIKNDKEGITTDPREIQTTIREYYKHLYTNKVENLEEMDKFLDTYTLPTLKQKKEVKTLNRPITGSEIEAIINSLPTKKSPGPDRFTAEFYRDIRSSGQGNQARERNKGYSIRKRGSQIVPVCRXHHCIFRKPHHLSPKSSXADKQLQQSLRIQNQSAKITSIPIHQXQTNREPNHEXTPIHNCFKENKMPRNPTYKGCEGSLQGELQTTAQXNKRGHKRMEEHSMLMDRKNQYRENGHTAQGNLXIQCHPHQATNDFFHRIGKNYFKVHMEPKKSPHRQVNPKPKEQSWRHHTTXLQTILQGYSNQNSMVLVPKQRHRPMEQNRAPGNNTIHLQLSDLXQIXQKQEMGKGFPIXXMVLGKLANHMXKAETGSLPHILYKNXFKMDXRLKCXTXNHKNPRRKPRQYHSGHRHGQGLHDXNTKSNGNKSQNXQMGSNXTKELLHSTRNYHQSEQATYRMGENFCNLLIXQRANIQNLQRTXTNLQDKNKQPHQKVGKGYEQTLLKRRHLCSQKTHEKMLIITGHQRNANQNHNEIPSHTSXNGDHSNQVRKQQVLERMWRN

SEQ ID NO: 10367 - protein, 1649 aa, Homo sapiens
  DOMAIN (777)..(822): kw TRANSCRIPTASE REVERSE II ORF2 domain identified by eMATRIX, accession number DM01354N, p-value=1.000e-40, raw score of 13.17
MVFSIDAQKAFDKIQHRFMLKTLNKLGIDGTYLKIIRAIYNKPTGNIILNGQKLEAFPLKTGTRQGCPLSPLLFNIVLEVLARAIRQEKEIKGIQLGKEEVKLSLFADDIIVYLENPIVSAQNLLKLIGNFSKVSGYKINVQKSQAFLYTNNRQTESQIMSELPFTIASKRIKYLGIQLTRDVKNLFKENYKPLLNEIKEDTDKWKNIPCSWIGRIHIVKMATLPKVIYRLHAIHIKLPMTFFTELEKTTLKFIWNKKRARIAKSILSQKNKGGGITPPDFKLYYKATVTKTARYWYQNRDIDQWKTREPSEIIPHIYNHLIFDKPDKNKKWGKDSLFNKWCWENWLAICRKLKLNPFLTPYTKINSRWIKDLNIRPKTIKTLEENLGNTIQDKGVGKDFMSQTPKAMATKAKIDKWDLIKLKSFCTAKETTIRVNRQPTEWEKIFAIYSSDKGLISRIYKELKQIDKKKANNPINKWAKDMNRHFSKEDIYAANRHMKKSSSSLAIREMQIKTTMRYHLTPVRMVIIKKSGNNSEGLNPGYKGFPTIIWAPLPVAQSKDSGLASLNSDPDIPSMLECSLKAPQLYRSKNVGQVFIISSASQAFTKKARIYARLRVSQALKTLCKSSCHDGWSFERLARIQEVSLPISPDLILCSEAYHYGTKPQWLVAATGTAQTFLELNQKSQQYQKQEQTHSKASRMQEITKIRAELKEIETRKTLQKIDESRSWFFERINKTDRPLARLTKQKREKNQIDAIKNGKGDITTDPTGIQITIREYYKHLYAKKLENLEEMDKFLDTYTLPRLNQEEVDSLNRPITGAEIVAIINSLPTKKSPGPDGFTAEFYQRHKEELVPFLLKLFQSIEKEGILPNSFYEASIILIPKPGRDTTKKENLRPISLMNIDAKILSKILANRIQQHIKKLIHHDQVCFIPGMQGWFNIRKSINVIQHINRAKDKNHMIISIDAEKAFDKIQQTFMLKTLNKLGIDGTYFKIIRAIYEKPTANIILNGQKLEAFPLKTGTRQGCPLSPLLFNIVLEVLARAIRQEKEIKGIQLGKEEVKLSLFADDMIVYLENPIVSAQNLLKLISNFSKVSGYKIYKIDVQKSQAFLYTNNTDKQESQIMSELPFTTASKRIKYLGIQLTRDVKDLFKENHKPLLNEIKEDTNKWKNIFIPCLWVGRINIVKMAILPKGIYRFNAIPIKLPMTFFTELEKTTLKFIWNQKRARITKSILSQKNKAGGITLPDFKLYYKATLTKTAWYWYQHRDINQWNRTEPSEIIPHIYNHLIFDKPDKNKKWGKHSLFNKWCWESWLDICRKLKLDPYTKFTPYTKINSRWIKGLNVRPKTIKTLEDKPIQVFNTIQDIGMGKDFMSKTPKAMATKAKIDKWDLIKLKSFCTGKETTIRVNRQPTEWEKIFAIYSSDKELISRIYKELKQIYKKKTNNPIKKWAKDMNRHFSKEDIYAANKHMKKCSSSLAIREMQIQTTMRYHLTPVRMAIIKKSGNNRCWRGCGEVGTLLHCWWDCNLVQPLWKSVWRFLRDLELEIPFDPAIPLLGIYPKDYKSCCYKDTCTRMFIVALFTIAKTWNQPKCPTMMDWIKKMWHIYTMEYYAAIKNDEFMSFVGTWMKLEIIILSKLSQEQKTKHRIFSLIGGN

SEQ ID NO: 10368 - protein, 164 aa, Homo sapiens
  DOMAIN (38)..(60): Globins profile domain identified by eMATRIX, accession number BL01033A, p-value=4.857e-17, raw score of 16.94
EFHRLRENPPMVAVSCPTKTNVKAAWGKVGAHAVRSMCAEALERMFLSFPTTKTYFPHFDLSHGSAQVKGATGKKVADALTNAVANVDDMPNVAVRPEATLHAHKLRVDPVNFKLLKPLACLVDPGPAHLPRPSFTPGGATSSLGQSFLGFLLKHRCLNLPNYR

SEQ ID NO: 10369 - protein, 22 aa, Homo sapiens
RHEAYVKSTKLVHKGTKAKRFA

SEQ ID NO: 10370 - protein, 417 aa, Homo sapiens
  DOMAIN (119)..(133): MATRIXIN SIGNATURE domain identified by eMATRIX, accession number PR00138E, p-value=8.429e-09, raw score of 6.01
SACAWRLPSPGPSAMWPLWRLVSLLALSQALPFEQRGFWDFTLDDGPFMMNDEEASGADTSGVLHPDSVTPTYSAMCPFGCHCHLRVVQCSDLGLKSVPKEISPDTTLLDLQNNDISELRKDDFKGLQHLYALVLVNNKISKIHEKAFSPLRKLQKLYISKNHLVEIPPNLPSSLVELRIHDNRIRKVPKGVFSGLRNMNCIEMGGNPLENSGFEPGAFDGLKLNYLRISEAKLTGIPKDLPETLNELHLDHNKIQAIELEDLLRYSKLYRLGLGHNQIRMIENGSLSFLPTLREVHLDNNKLARVPSGFPDLKLLQVVYILHSNNIHQSGVFNEFLFPWGFGGEAGPYYNGHISLFNNPVPYWEVQPATFRVVTDRLAIQFGQLQKVEAAAATLVSQWGSLGNRARHPDGEAEPGS

SEQ ID NO: 10371 - protein, 845 aa, Homo sapiens
  DOMAIN (695)..(709): PROTEIN SH3 DOMAIN REPEAT PRESYNA domain identified by eMATRIX, accession number PD00289, p-value=3.160e-10, raw score of 9.97
MAERGQCTAQAVASEGGRSKPWQLLRGIEPAGAQKSRIEVWEPLPRFQKMDAQAIVLLQGQGTHGEPLAASYPSSGQIQRRYQGLALRTLGIFLSFYSTAAELTPKPKDKLLLILLSRFLKQRNLSPWPPLPQACSKYCKAVADIHSRSKGSLVSLWSMLIGLGISLQGNGLPSGPEIKRVKLISNKGTETDNDPSCVHPIIKRRQCRPEIRMWQTREKAKFSDGEKCRREAFRRLGNGVSDDLSSEEDGEARTQMILLRRSVEGASSDNGCEVKNRKSILSRHLNSQVKKTTTRWCHIVRDSDSLAESEFESAAFSQGSRSGVSGGSRSLNMSRRDSESTRHDSETEDMLWDDLLHGPECRSSVTSDSEGAHVNTLHSGTKRDPKEDVFQQNHLFWLQNSSPSSDRVSAIIWEGNECKKMDMSVLEISGIIMSRRFLFAKLFSHITSARKARKYEIPHFRLKKVENIKIWLSLRSYLKSMCKNMLTEAPGSSYSVDSVVLGVRQIIAAADRLAGQQVGCHLSAKLVGVGHEDQVPGGDLPLLCASRTRFKAFVTIEDYNGYVGLGVSAPRRGVGTVLAPVPRNLLLMVVTHHCCTLTGDCAATLANFAKGTFDAISKTYSYFTPNLCCGKLNHKLSKCLDSPLAGIKTYLSRKVMTAETSEIPTCLFTCTGALSSAKANEWCFRRSKSFSNWVGDQIVEINGEPTQGITHTRAIELIQAGGNKVLLLLRPGTGLIPDHVIAIVLYLMMPIVNISEVLGPLCLMLLMGTVHCQIVSTQITRPSGNNGNRRRRKLRKTVNGDGSRENGNNSSDKVRGIETLESVPIIGGFWETIFGNSICYRLSFA

SEQ ID NO: 10372 - protein, 773 aa, Homo sapiens
  DOMAIN (616)..(644): 0 kw GALACTOSEPHOSPHOTRANSFERASE PHOSPHATE UNDECAPRENYL TRAN domain identified by eMATRIX, accession number DM01555A, p-value= 8.846e-09, raw score of 16.35
NPILWLETQMASNERDAISWYQKKIGAYDQQIWEKSIEQTQIKGLKNKPKKMGHIKPDLIDVDLIRGSTFAKAKPEIPWTSLTRKGLVRVVFFPLFSNWWIQVTSLRIFVWLLLLYFMQVIAIVLYLMMPIVNISEVLGPLCLMLLMGTVHCQIVSTQITRPSGNNGNRRRRKLRKTVNGDGSRENGNNSSDKVRGIETLESVPIIGGFWETIFGNRIKRVKLISNKGTETDNDPSCVHPIIKRRQCRPEIRMCQTREKPKFSDGEKCRREAFRRLGNGVSDDLSSEEDGEARTQMILLRRSVEGASSDNGCEVKNRKSILSRHLNSQVKKTTTRWCHIVRDSDSLAESEFESAAFSQGSRSGVSGGSRSLNMSRRDSESTRHDSETEDMLWDDLLHGPECRSSVTSDSEGAHVNTLHSGTKRDPKEDVFQQNHLFWLQNSSPSSDRVSAIIWEGNECKKMDMSVLEISGIIMSRVNAYQQGVGYQMLGNVVTIGLAFFPFLHRLFREKSLDQLKSISAEEILTLFCGAPPVTPIIVLSIINFFERLCLTWMFFFMMCVAERTYKQRFLFAKLFSHIYFCQGKLGKYEIPHFRLKKVENIKIWLSLRSYLKRRGPQRSVDVVVSSVFLLTLSIAFICCAQVLQGHKTSWNDAYNWGVFDLGETALLLFLLRLASLGSETNKKYSNVSILLTEQINLYLKMEKKPNKKEQLTLVNNVLKLSTKLLKELDTPFRLYGLTMNPLIYNITRVVILSAVSGVISDLLGFNIRLWKIKS

SEQ ID NO: 10373 - protein, 96 aa, Homo sapiens
  DOMAIN (42)..(96): Eukaryotic initiation factor 1A proteins domain identified by eMATRIX, accession number BL01262, p-value=6.625e-12, raw score of 22.38
  misc_feature (1)...(96): Xaa = X or * as defined in Table 2
XVPGSRGPETKLWDDFSMSQATKRKHVVKEVLGEHIVPSDQQQIVRVLRTPGNNLHEVETAQGQRFLVSMPSKYRKNIWIKRGDFLIVDPIEEGEK

SEQ ID NO: 10374 - protein, 40 aa, Homo sapiens
TSEPMFLTKTPCHPSVKGPSPSSEQSWVLSLPSKELRRRS

SEQ ID NO: 10375 - protein, 83 aa, Homo sapiens
  misc_feature (1)...(83): Xaa = X or * as defined in Table 2
FLPRRGDNDSYPQWTKACCRRRRTCWXTXTWWIRSGQRKMWSCGRRSLTTCPMPRTRTAARLMACGSGSWRRSGPSCGCRLSP

SEQ ID NO: 10376 - protein, 117 aa, Homo sapiens
MTTSQKHRDFVAEPMGEKPVGSLAGIGEVLGKKLEERGFDKAYVVLGQFLVLKKDEDLFREWLKDTCGANAKQSRDCFGCLREWCAKSRPAAEVSELKADSKEGPQAQGPEQERTGL

SEQ ID NO: 10377 - protein, 115 aa, Homo sapiens
  misc_feature (1)...(115): Xaa = X or * as defined in Table 2
FLPRRGDNDSYPQWTKACCRRRRTCWXTXTWWIRSGQRKMWSCGRRSLTTCPMPRTRAWTTWRSKNLALSCPSMTKSLKGSGHIPSAWSRAARLMACGSGSWRRSGPSCGCRLSP

SEQ ID NO: 10378 - protein, 210 aa, Homo sapiens
SCGLSLIKMTTSQKHRDFVAEPMGEKPVGSLAGIGEVLGKKLEERGFDKGLYVVLGQFLADIEKMKTSFREWLKDTCGANAKQSRDCFRMPFEKWCEALLVDALLGKFSIPPAPQSRSLASRSRDSSPCPSYEGKDCYCRTHLRRYFRGSFGEFSPLNHFQLFFGILRSWHAFPRPFFPWPVSWVTVYQLFLEWDFPGPIPHPHPHFQSV

SEQ ID NO: 10379 - protein, 124 aa, Homo sapiens
TFMFVFLSSAGNMPVTCWCWEAPRCNQKCTDPAARRPDPQTCASQDRLRCAPCTCHQPLASRYTPPPACPPSHVSLHTLATSLQHFLNKNYKNYIAKMCKLSILSLSFLKEGAGDKNSSEPNLG

SEQ ID NO: 10380 - protein, 129 aa, Homo sapiens
  misc_feature (1)...(129): Xaa = X or * as defined in Table 2
AGFSLSAQKSPGAMAXYSYVKSSKLVLKGTSKKKKSKDKKRKREDEETQLDIVGIWXTVTNFGEISGTIAIGMDEGTYIHALDNGLFTLGAPHKERIALKSGYGKYLGINSDELVGHSDAIGPREQWEH

SEQ ID NO: 10381 - protein, 64 aa, Homo sapiens
ASCPNPKEFAPPRAGPPWFWGPPLARVNPGLGGPFSGTRPTPPQPLPEQRVTLTSTNPWLAASV

SEQ ID NO: 10382 - protein, 114 aa, Homo sapiens
AHGRQLRKYSQQQGCSWRLPFCGCHAVSGGGCGKCCSPANGPCGAACLGFQPHNFPDPCETCCGCHAVSGGGCGKCCISSKWSLWCSPAWVSSHTTSRIPVKLAGLPSPSFLPG

SEQ ID NO: 10383 - protein, 163 aa, Homo sapiens
  DOMAIN (29)..(68): TRANSCRIPTION PROTEIN DNA-BINDIN domain identified by eMATRIX, accession number PD02448A, p-value=6.927e-09, raw score of 9.37
MGSLSLNLPFVVTVLLMCLSRSRKGDAASQFLVFCQKHRDEVVAEHPDASGEEIEELLRSQWSLLSEKQRARYNTKFALVAPVQAEEDSGNVNGKKRNHTKRIQDPTEDAEAEDTPRKRLRTDKHSLRKRDTITDKTARTSSYKAMEAASSLKSQAATKNLSD

SEQ ID NO: 10384 - protein, 1372 aa, Homo sapiens
  DOMAIN (1153)..(1187): PROTEIN TRANSCRIPTION REGULATION NUCLEAR domain identified by eMATRIX, accession number PD02411, p-value=2.125e-15, raw score of 21.89
ERKHLGWMEFSIKQSPLSVQSVVKCIKMKQAPEILGSANGKTPSCEVNRECSVFLSKAQLSSSLQEGVMQKFNGHDALPFIPADKLKDLTSRVFNGEPGAHDAKLRFESQEMKGIGTPPNTTPIKNGSPEIKLKITKTYMNGKPLFESSICGDSAADVSQSEENGQKPENKARRNRKRSIKYDSLLEQGLVEAALVSKISSPSDKKIPAKKESCPNTGRDKDHLLKYNVGDLVWSKVSGYPWWPCMVSADPLLHSYTKLKGQKKSARQYHVQFFGDAPERAWIFEKSLVAFEGEGQFEKLCQESAKQAPTKAEKIKLLKPISGKLRAQWEMGIVQAEEAASMSVEERKAKFTFLYVGDQLHLNPQVAKEAGIAAESLGEMAESSGVSEEAAENPKSVREECIPMKRRRRAKLCSSAETLESHPDIGKSTPQKTAEADPRRGVGSPPGRKKTTVSMPRSRKGDAASQFLVFCQKHRDEVVAEHPDASGEEIEELLRSQWSLLSEKQRARYNTKFALVAPVQAEEDSGNVNGKKRNHTKRIQDPTEDAEAEDTPRKRLRTDKHSLRKRDTITDKTARTSSYKAMEAASSLKSQAATKNLSDACKPLKKRNRASTAASSALGFSKSSSPSASLTENEVSDSPGDEPSESPYESADETQTEVSVSSKKSERGVTAKKEYVCQLCEKPGSLLLCEGPCCGAFHLACLGLSRRPEGRFTCSECASGIHSCFVCKESKTDVKRCVVTQCGKFYHEACVKKYPLTVFESRGFRCPLHSCVSCHASNPSNPRPSKGKMMRCVRCPVAYHSGDACLAAGCSVIASNSIICTAHFTARKGKRHHAHVNVSWCFVCSKGGSLLCCESCPAAFHPDCLNIEMPDGSWFCNDCRAGKKLHFQDIIWVKLGNYRWWPAEVCHPKNVPPNIQKMKHEIGEFPVFFFGSKDYYWTHQARVFPYMEGDRGSRYQGVRGIGRVFKNALQEAEARFREIKLQREARETQESERKPPPYKHIKVNKPYGKVQIYTADISEIPKCNCKPTDENPCGFDSECLNRMLMFECHPQVCPAGEFCQNQCFTKRQYPETKIIKTDGKGWGLVAKRDIRKGEFVNEYVGELIDEEECMARIKHAHENDITHFYMLTIDKDRIIDAGPKGNYSRFMNHSCQPNCETLKWTVNGDTRVGLFAVCDIPAGTELTFNYNLDCLGNEKTVCRCGASNCSGFLGDRPKTSTTLSSEEKGKKTKKKTRRRRAKGEGKRQSEDECFRCGDGGQLVLCDRKFCTKAYHLSCLGLGKRPFGKWECPWHHCDVCGKPSTSFCHLCPNSFCKEHQDGTAFSCTPDGRSYCCEHDLGAASVRSTKTEKPPPEPGKPKGKRRRRRGWRRVTEGK

SEQ ID NO: 10385 - protein, 218 aa, Homo sapiens
  misc_feature (1)...(218): Xaa = X or * as defined in Table 2
AFLRMLFPESWMETRRGAPAPPAPRSETSHDLVATLMRCTPHYIRXSNPTRPRGPETGRRTAXTRSPQVPHLQHLPPTPRLVTPHPEGTQPTLPTRSSTRWNTWAXRRTSGCESRLRLPPPVRQIPAEYAILTPETWPRWRGDEPRASSTCFGRSTWSPTRPDGEHQGLCQEPRVAFPPGGGAKRKFDGFARTIQKAWRRTWLSGSTRRCGRKLPTSC

SEQ ID NO: 10386 - protein, 1365 aa, Homo sapiens
  DOMAIN (1146)..(1180): PROTEIN TRANSCRIPTION REGULATION NUCLEAR domain identified by eMATRIX, accession number PD02411, p-value=2.125e-15, raw score of 21.89
MEFSIKQSPLSVQSVVKCIKMKQAPEILGSANGKTPSCEVNRECSVFLSKAQLSSSLQEGVMQKFNGHDALPFIPADKLKDLTSRVFNGEPGAHDAKLRFESQEMKGIGTPPNTTPIKNGSPEIKLKITKTYMNGKPLFESSICGDSAADVSQSEENGQKPENKARRNRKRSIKYDSLLEQGLVEAALVSKISSPSDKKIPAKKESCPNTGRDKDHLLKYNVGDLVWSKVSGYPWWPCMVSADPLLHSYTKLKGQKKSARQYHVQFFGDAPERAWIFEKSLVAFEGEGQFEKLCQESAKQAPTKAEKIKLLKPISGKLRAQWEMGIVQAEEAASMSVEERKAKFTFLYVGDQLHLNPQVAKEAGIAAESLGEMAESSGVSEEAAENPKSVREECIPMKRRRRAKLCSSAETLESHPDIGKSTPQKTAEADPRRGVGSPPGRKKTTVSMPRSRKGDAASQFLVFCQKHRDEVVAEHPDASGEEIEELLRSQWSLLSEKQRARYNTKFALVAPVQAEEDSGNVNGKKRNHTKRIQDPTEDAEAEDTPRKRLRTDKHSLRKRDTITDKTARTSSYKAMEAASSLKSQAATKNLSDACKPLKKRNRASTAASSALGFSKSSSPSASLTENEVSDSPGDEPSESPYESADETQTEVSVSSKKSERGVTAKKEYVCQLCEKPGSLLLCEGPCCGAFHLACLGLSRRPEGRFTCSECASGIHSCFVCKESKTDVKRCVVTQCGKFYHEACVKKYPLTVFESRGFRCPLHSCVSCHASNPSNPRPSKGKMMRCVRCPVAYHSGDACLAAGCSVIASNSIICTAHFTARKGKRHHAHVNVSWCFVCSKGGSLLCCESCPAAFHPDCLNIEMPDGSWFCNDCRAGKKLHFQDIIWVKLGNYRWWPAEVCHPKNVPPNIQKMKHEIGEFPVFFFGSKDYYWTHQARVFPYMEGDRGSRYQGVRGIGRVFKNALQEAEARFREIKLQREARETQESERKPPPYKHIKVNKPYGKVQIYTADISEIPKCNCKPTDENPCGFDSECLNRMLMFECHPQVCPAGEFCQNQCFTKRQYPETKIIKTDGKGWGLVAKRDIRKGEFVNEYVGELIDEEECMARIKHAHENDITHFYMLTIDKDRIIDAGPKGNYSRFMNHSCQPNCETLKWTVNGDTRVGLFAVCDIPAGTELTFNYNLDCLGNEKTVCRCGASNCSGFLGDRPKTSTTLSSEEKGKKTKKKTRRRRAKGEGKRQSEDECFRCGDGGQLVLCDRKFCTKAYHLSCLGLGKRPFGKWECPWHHCDVCGKPSTSFCHLCPNSFCKEHQDGTAFSCTPDGRSYCCEHDLGAASVRSTKTEKPPPEPGKPKGKRRRRRGWRRVTEGK

SEQ ID NO: 10387 - protein, 49 aa, Homo sapiens
RDTITDKTARTSSYKAMEAASSLKSQAGNVVSALSFLASGCPGWAGWVG

SEQ ID NO: 10388 - protein, 352 aa, Homo sapiens
  misc_feature (1)...(352): Xaa = X or * as defined in Table 2
PHRKQAEPPRHHERLGRRVRHHARHGRGSRPDTAAEAAGGCGDPRAFQQLERRLRHPPLRWQGLLRRQRLLREEPRRSLLRPHRADAVQXPGLPPDALPREAGWRQEGAPQHRRLQDYETCQLTWWPHXXGAHPTTSAALNPTRPRGPETGRRTESSTRWNTWAXRRTSGCAEPASPTASQFAKFLQRYAILTPETWPRWRGDERHGVQHLLRAVNMEPDQYQMGSTKVFVKNPVVAFPPGGGARAKVRWLCPNHPEGLAAPRGCPEVRGDARRKLPTSCXTRRSGGATASIGTSSGTTWGWRSGPSCVSSWARRSGWTSPIRSPSTTAASSPSSGTXSXRPSVCMXLGERR

SEQ ID NO: 10389 - protein, 1498 aa, Homo sapiens
  DOMAIN (841)..(858): PWWP domain proteins domain identified by eMATRIX, accession number PF00855, p-value=8.744e-18, raw score of 13.75
  misc_feature (1)...(1498): Xaa = X or * as defined in Table 2
MEGNVNAHRASGAQIRTCRAPPGATGCTALFKANSPEFTGLKSAQRGRGPVVGAPRKRFSGLRGHREAERRTLGWGSQAPPPAAQAHTPAAGDSTLLLRSAVPGTCLLYAPHPQDFPPAGFLREQWWPRLLTLQVFLHLRTGGRVGPVDWVLLGGGRLLGGHRMPGPCNLAEAVLLREARWPWGEAGGSEEGEPSGGSVGGNCQRARPLPSAHPEAQQGVGLEVGRGMVAPAASYFADEGRPNGDHPARQPRLGPLGAHGRRHLKSFPDTGSLNLELEEQNPNVQDILGELREKVGECEASAMLPLECQYLNKNALTTLAGPLTPPVKHFQLKRKPKSATLRAELLQKWPCRSGVHANVHISTAAQRVMTKHLQRADEHPHFCVEEWHSGLISAFYYCEKHLAENHILDRIIDAGPKGNYSRFMNHSCQPNCETLKWTVNGDTRVGLFAVCDIPAGTELTFNYNLDCLGNEKTVCRCGASNCSGFLGDRPKTSTTLSSEEKGKKTKKKTRRRRAKGEGKRQSEDECFRCGDGGQLVLCDRKFCTKAYHLSCLGLGKRPSPDHIPLKNGFVASCLLFCGDCGLQTPAAPYCCTSGVLHLSTVDISGRIALLRGHPVRCRRCSSIHDRNPSESVVKCIKMKQAPEILGSANGKTPSCEVNRECSVFLSKAQLSSSLQEGVMQKFNGHDALPFIPADKLKDLTSRVFNGEPGAHDAKLRFESQEMKGIGTPPNTTPIKNGSPEIKLKITKTYMNGKPLFESSICGDSAADVSQSEENGQKPENKARRNRKRSIKYDSLLEQGLVEAALVSKISSPSDKKIPAKKESCPNTGRDKDHLLKYNVGDLVWSKVSGYPWWPCMVSADPLLHSYTKLKGQKKSARQYHVRFFVYAPERAWIFEKSLVAFEGEGQFEKLCQESAKQAPTKAEKIKLLKPISGKLRAQWEMGIVQAEEAASMSVEERKAKFTFLYVGDQLHLNPQVAKEAGIAAESLGEMAESSXVSEEAAENPKSVREECIPMKRRRRAKLCSSAETLESHPDIGKSTPQKTAEADPRRGVGSPPGRKKTTVSMPRSRKGDAASQFLVFCQKHRDESGGRDSAFTCRSPQNYPVEEPASELVGAEPVSRLSKGLVVAEHPDASGEEIEELLRSQWSLLSEKQRARYNTKFALVAPVQAEEDSAPLKGIPKQAPFRSPTAPSVFSPTGNRTPIPPSRTLLRKERGVKAGLCLSWQLLDISELDMVGAGREAKRRRKTLDAEVVEKPAKEETVVENATPDYAAGLVSTQKLGSLNNEPALPSTSYLPSTPSVVPASSYIPSSETPPAPSSREASRPPEEPSAPSPTLPAQFKQRAPMYNSGLSPATPTPAAPTSPLTPTTPPAVAPTTQTPPVAMVAPQTQAPAQQQPKKNLSLTREQMFAAQEMFKTANKVTRPEKALILGFMAGSRENPCQEQGDVIQIKLSEHTEDLPKADGQGSTTMLVDTVFEMNYATGQWTRFKKYKPMTNVS

SEQ ID NO: 10390 - protein, 637 aa, Homo sapiens
  DOMAIN (231)..(248): PWWP domain proteins domain identified by eMATRIX, accession number PF00855, p-value=8.744e-18, raw score of 13.75
ERKHLGWMEFSIKQSPLSVQSVVKCIKMKQAPEILGSANGKTPSCEVNRECSVFLSKAQLSSSLQEGVMQKFNGHDALPFIPADKLKDLTSRVFNGEPGAHDAKLRFESQEMKGIGTPPNTTPIKNGSPEIKLKITKTYMNGKPLFESSICGDSAADVSQSEENGQKPENKARRNRKRSIKYDSLLEQGLVEAALVSKISSPSDKKIPAKKESCPNTGRDKDHLLKYNVGDLVWSKVSGYPWWPCMVSADPLLHSYTKLKGQKKSARQYHVQFFGDAPERAWIFEKSLVAFEGEGQFEKLCQESAKQAPTKAEKIKLLKPISGKLRAQWEMGIVQAEEAASMSVEERKAKFTFLYVGDQLHLNPQVAKEAGIAAESLGEMAESSGVSEEAAENPKSVREECIPMKRRRRAKLCSSAETLESHPDIGKSTPQKTAEADPRRRGVGSPPGRKKTTVSMPRSRKGDAASQFLVFCQKHRDEVVAEHPDASGEEIEELLRSQWSLLSEKQRARYNTKFALVAPVQAEEDSGNVNGKKRNHTKRIQDPSENADLEDTPRKGLRTDKHSLRKRDTITDKTARTSSYKAMEAASSLKSQAATKNLSDACKPLKKRNRASTAASSALGFSKSSSPSASLTENEVK

SEQ ID NO: 10391 - protein, 177 aa, Homo sapiens
  misc_feature (1)...(177): Xaa = X or * as defined in Table 2
EPSRGVWPHEDARINGSKKKKSKDKKRKREEDEETQFDIVGIWXTVTNFDEISGTIAIEMDEGTYIHALDNGLFTLGAPHKERIALKPGYGKYLSINSDELVVGRSDAIGPREQWEPVFQNGACAAVFTVIGSEKQSECSLLRESRAKYHGCTHGQISSSLKQHPRWMYSHQEDLKV

SEQ ID NO: 10392 - protein, 36 aa, Homo sapiens
SCSGDMAGVKALVALSFSGAIGLTFLMLGCALEDYG

SEQ ID NO: 10393 - protein, 48 aa, Homo sapiens
GFNPSFLVFQIKGGACAVVLAGNAVIFLTIQGFFLIFGRGDDFSWEQW

SEQ ID NO: 10394 - protein, 63 aa, Homo sapiens
GTSRSGLGRLPGPWQEAGSSRGPSSGDMAGVKALVALSFSGAIGLTFLMLGCALEDYGCTSLK

SEQ ID NO: 10395 - protein, 157 aa, Homo sapiens
SGLGRLPGPWQEAGSSRGPSSGDMAGVKALVALSFSGAIGLTFLHMLGCALEDYGVYWPLFVLFFHAISPIPHFIAKRVTYDSDATSSACRELAYFFTTGIVVSCLWISPVILARVALIKWGACAFVLAGNAVIFPYNSRGFSLYLGRGDDFSWEQW

SEQ ID NO: 10396 - protein, 194 aa, Homo sapiens
  DOMAIN (45)..(83): Ribosomal protein S8e proteins domain identified by eMATRIX, accession number BL01193B, p-value=1.000e-40, raw score of 17.23
ARAMGISRDNLHKRRKTGGKRKPYHKKRKYELGRPAANTKIGPRRIHTVRVRGGNKKYRALRLDVGNFSWGSECCTRKTRIIDIVYNASNNELVRTKTLVKNCIVLIDSTPYRQWTPEEEEILNKKRSKKIQKKYDERKKNAKISSLLEEQFQQGKLLACIASRPGQCGRADGYVLEGKELEFYLRKIKARKGK

SEQ ID NO: 10397 - protein, 239 aa, Homo sapiens
  DOMAIN (54)..(92): Ribosomal protein S8e proteins domain identified by eMATRIX, accession number BL01193B, p-value=1.000e-09, raw score of 17.23
  misc_feature (1)...(239): Xaa = X or * as defined in Table 2
LFPASAEQMGISRDNWHKPRKTGGPRESPYQQEAKSMSLGRPAANTKILAPRRIQHSPVCRGGXQVNTVPLRFDVGNFSWGSKECCTRKTRIIDVVYNAIXXPSWVRYPRPLVERICIVLIDEQHPYRQWVRSPTYALPLGPQRKGAKLDSLRKEEIFKPKTDLKXIQKKYDXERKKNCQNSASLPGRSSFQQGKASLRCIAFKRPGQCGRADGYMTRGHRVRSYYLRKIKARQSKINT

SEQ ID NO: 10398 - protein, 55 aa, Homo sapiens
  misc_feature (1)...(55): Xaa = X or * as defined in Table 2
XKNQCETRTMQENGYSSHAVDGTGPAGGAGRPAGSTGAQVSVQPNFQQDKFLGRX

SEQ ID NO: 10399 - protein, 117 aa, Homo sapiens
GYRAGIPGSSWLREKKAALSMFKSVLAPATDGGLNLSSTFLRKNQCETRTMLLQPAGSLGSYSYRSPREWGLHRPPGPSLGATLAGTTLGQPPAAEIHGVGGDGCPTSVRGKGQAWA

SEQ ID NO: 10400 - protein, 222 aa, Homo sapiens
  DOMAIN (152)..(165): LIPOCALIN SIGNATURE domain identified by eMATRIX, accession number PR00179B, p-value=1.000e-12, raw score of 9.56
SAVEFPPSLSHTTGTRPRTPILLQQENGYFIHTLWMGLALLGVLGDLSGQHRRPRSPCQPNFQQDKFLGRWFKRGLASNSSWLREKKAALSMCKSVVAPATDGGFNLTSTFLQEKTSVETRTMLLQPRGVPSASLQLTGVPHWGQAHYSVSVVETDYDQYALLYTRASKGPGEDFRMATLYSRTQTPRAELKEKFTAFCKAQGFTEDTIVFLPQTDKCMTEQ

SEQ ID NO: 10401 - protein, 122 aa, Homo sapiens
HVACGLLWIYVSPSAHLNLDGTITTKENLGTVNEILLGSNPTEAELQDMINEVMSDGNGTIDFPEFLTMMARKMKDTDSEGRKLEEAFRVFGLRVGNGLYLVACRNFRHVDGQTLGGGSLPD

SEQ ID NO: 10402 - protein, 230 aa, Homo sapiens
  misc_feature (1)...(230): Xaa = X or * as defined in Table 2
YVQSLKQILSGCIXESIAIKKKKNKDKKRKREEDEETQLDIVGIWWTVTNFGEISGTIAIEMDKGTYIHALDNGLFTLGAPHKEVDEGPSPPEQFTAVKLSDSRIALKSGYGKYLGINSDGLVVGRSDAIGPREQWEPVFKMGKMALSTSNSCFIRIHEAEDIEAKSKTAGEEEMIKGSPNLCQTFTFMTLPYLPEHRSLLLKIRSCAERETKKKDDIPEEDKGNIKQCE

SEQ ID NO: 10403 - protein, 482 aa, Homo sapiens
  DOMAIN (449)..(462): EF-hand calcium-binding domain proteins domain identified by eMATRIX, accession number BL00018, p-value=2.350e-10, raw score of 7.41
MELEQLMTLISAAREYEIEFIYAISPGLDITFSNPKEVSTLKRKLDQTLTSSHLNIPEKRMSVKGGGDFKQGDQEDLVDNFGSEHTPSGPSLGNSGTGCSPWASAESEKEVRGMATGTARNQKWLGVRDCASPLMGGAGTGRGSPALCVSGAEFEEGSYSMAAGCELSGHTRSFTFKVEEEDDAEHVLALTMLCLTEGAKDECNVVEVVARNHDHQEIAVPVANLKLSCQPMLSLDDFQLQPPVTFRLKSGSGPVRITGRHQIGHPPGPTKKALKQRFLKLLPCCGPQALPSVSESKCLSCASGGGARCVHSVDDEFELSTVCHRPEGLEQLQEQTKFTRKELQVLYRGFKNECPSGIVNEENFKQIYSQFFLKEDFVAGLSVILRGTVDDRLNWAFNLYDLNKDGCITKEEMLDIMKSIYDMMGKYTYPALREEAPREHVESFFQKMDRNKDGVVTIEEFIESCQKDENIMRSMQLFDNVI

SEQ ID NO: 10404 - protein, 930 aa, Homo sapiens
VLSKGNERSQPRSPLRLLAPQLKAEAAADKGLAPVPPPFSSGHSGPCEREGEGQRGRGRSRRGAHLELKPSPGLRAGAPTDRGRGGPAEVAAAGGRRMVQKESQATLEERESELSSNPAASAGASLEPPAAPAPGEDNPAGAGGAAVAGAAGGARRFLCGVVEEQLMTLISAAREYEIEFIYAISPGLDITFSNPKEVSTLKRKLDQVSQFGCRSFALLFDDIDHNMCAADKEVFSSFAHAQVSITNEIYQYLGEPETFLFCPTEYCGTFCYPNVSQSPYLRTVGEKLLPGIEVLWTGPKVVSKEIPVESIEEVSKIIKRAPVIWDNIHANDYDQKRLFLGPYKGRSTELIPRLKGVLTNPNCEFEANYVAIHTLATWYKSNMNGVRKDVVMTDSEDSTVSIQIKLENEGSDEDIETDVLYSPQMALKLALTEWLQEFGVPHQYSSRQVAHSGAKASVVDGTPLVAAPSLNATTVVTTVYQEPIMSQGAALSGEPTTLTKEEEKKQPDEEPMDMVVEKQEETDHKNDNQILSEIVEAKMAEELKPMDTDKESIAESKSPEMSMQEDCISDIAPMQTDEQTNKEQFVPGPNEKPLYTAEPVTLEDLQLLADLFYLPYEHGPKGAQMLREFQWLRANSSVVSVNCKGKDSEKIEEWRSRAAKFEEMCGLVMGMFTRLSNCANRTILYDMYSYVWDIKSIMSMVKSFVQWLEDEDGICGYALGTVDVTPFIKKCKISWIPFMQEKYTKPNGDKELSEAEDCASPLMGGAGTGRGSPALCVSGAEFEEGSYSMAAGCELSGHTRSFTFKVEEEDDAEHVLALTMLCLTEGAKDECNVVEVVARNHDHQEIAVPVANLKLSCQPMLSLDDFQLQPPVTFRLKSGSGPVRITGRHQIVTMSNDVSEEESEEEEEDSDEEEVELCPILPAKKQGGRP

SEQ ID NO: 10405 - protein, 207 aa, Homo sapiens
VLSKGNERSQPRSPLRLLAPQLKAEAAADKGLAPVPPPFSSGHSGPCEREGEGQRGRGRSRRGAHLELKPSPGLRAGAPTDRGRGGPAEVAAAGGRRMVQKESQATLEERESELSSNPAASAGASLEPPAAPAPGEDNPAGAGGAAVAGAAGGARRFLCGVVEEQLMTLISAAREYEIEFIYAISPGLDITFSNPKEVSTLKRKLDQ

SEQ ID NO: 10406 - protein, 636 aa, Homo sapiens
  DOMAIN (83)..(123): Poly-adenylate binding protein unique domain proteins. domain identified by eMATRIX, accession number PF00658A, p-value=1.000e- 40, raw score of 19.88
MNPSAPSYPMASLYVGDLHPDVTEAMLYEKFSPAGPILSIRVCRDMITRRSLGYAYVNFQQPADAERALDTMNFDVIKGKPVRIMWSQRDPSLRKSGVGNIFIKNLDKSIDNKALYDTFSAFGNILSCKVVCDENGSKGYGFVHFETQEAAERAIEKMNGMLLNDRKVFVGRFKSRKEREAELGARAKEFTNVYIKNFGEDMDDERLKDLFGKFGPALSVKVMTDESGKSKGFGFVSFERHEDAQKAVDEMNGKELNGKQIYVGRAQKKVERQTELKRKFEQMKQDRITRYQGVNLYVKNLDDGIDDERLRKEFSPFGTITSAKVMMEGGRSKGFGFVCFSSPEEATKAVTEMNGRIVATKPLYVALAQRKEERQAHLTNQYMQRMASVRAVPNPVINPYQPAPPSGYFMAAIPQTQNRAAYYPPSQIAQLRPSPRWTAQGARPHPFQNMPGAIRPAAPRPPFSTMRPASSQVPRVMSTQRVANTSTQTMGPRPAAAAAAATPAVRTVPQYKYAAGVRNPQQHLNAQPQVTMQQPAVHVQGQEPLTASMLASAPPQEQKQMLGERLFPLIQAMHPTLAGKITGMLLEIDNSELLHMLESPESLRSKVDEAVAVLQAHQAKEAAQKAVNSATGVPTV

SEQ ID NO: 10407 - protein, 963 aa, Homo sapiens
PRRCSTGNSGRPKIIRRAAEAENEDRTLGRLLPGNERSQPRSPLRLLAPQLKAEAAVDKGLARVPPPFSSGHSGPCEREGEGQRGRGRSRRGAHLELKPFSGLRAGAPTDRGRGGPAEVAAAGGRRMVQKESQATLEERESELSSNPAASAGASLEPPAAPAPGEDNPAGAGGAAVAGAAGGARRFLCGVVEGFYGRPWVMEQRKELFRRLQKWELNTYLYAPKDDYKHRMFWREMYSVEEAEQLMTLISAAREYEIEFIYAISPGLDITFSNPKEVSTLKRKLDQVSQFGCRSFALLFDDIDHNMCAADKEVFSSFAHAQVSITNEIYQYLGEPETFLFCPTEYCGTFCYPNVSQSPYLRTVGEKLLPGIEVLWTGPKVVSKEIPVESIEEVSKIIKRAPVIWDNIHANDYDQKRLFLGPYKGRSTEVIPRLKGVLTNPNCEFEANYVAIHTLATWYKSNMNGVRKDVVMTDSEDSTVSIQIKLENEGSDEDIETDVLYSPQMALKLALTEWLQEFGVPHQYSSRQVAHSGAKASVVDGTPLVAAPSLNATTVVTTVYQEPIMSQGAALSGEPTTLTKEEEKKQPDEEPMDMVVEKQEETDHKNDNQILSEIVEAKMAEELKPMDTDKESIAESKSPEMSMQEDCISDIAPMQTDEQTNKEQFVPGPNEKPLYTAEPVTLEDLQLLADLFYLPYEHGPKGAQMLREFQWLRANSSVVSVNCKGKDSEKIEEWRSRAAKFEEMCGLVMGMFTRLSNCAGRTILYDMYSYVWDIKSIMSMVKSFVQWLGCRSHSSAQFLIGDQEPWAFRGGLAGEFQRLLPIDGANDLFFQPPPLTPTSKVYTIRPYFPKDEASVYKICREMYDDGVGLPFQSQPDLIGDKLVGGLLSLSLDYCFVLEDEDGICGYALGTVDVTPFIKKCKISWIPFMQEKYTKPNGDKELSEAEKIMLSFHEEQEVLPETFPC

SEQ ID NO: 10408 - protein, 149 aa, Homo sapiens; identical to SEQ ID NO: 8286
  DOMAIN (33)..(55): Globins profile domain identified by eMATRIX, accession number BL01033A, p-value=3.250e-20, raw score of 16.94

SEQ ID NO: 10409 - protein, 165 aa, Homo sapiens
  DOMAIN (37)..(59): Globins profile domain identified by eMATRIX, accession number BL01033A, p-value=7.000e-19, raw score of 16.94
NSTDSERTHPWLLSPADKTTVKAPAWGKVGAHAGEYGSEALERMFLSFPTTKTYFPHFDLSHGFCPGLRATGKKVADALTKRRGAPLDDMPNALVRPLSDLHAHKLRVGPGSTFKLLKPLACLLTLGPAHLPRPSFTPGGCKASLGQSFLGFLLKHRCLNLPNYR

SEQ ID NO: 10410 - protein, 25 aa, Homo sapiens
  misc_feature (1)...(25): Xaa = X or * as defined in Table 2
MRTRGSAXXFXSXCXSXAGXQFXXS

SEQ ID NO: 10411 - protein, 55 aa, Homo sapiens
  misc_feature (1)...(55): Xaa = X or * as defined in Table 2
IRGSVVLSLNFLLNTFFTPXRSFISTSVMFXKPFIFSFLMLLLXVFIFSLKILSY

SEQ ID NO: 10412 - protein, 115 aa, Homo sapiens
IAWAFKINWLPIIFLIFSVLFYPIFGFIFFYLLYFSNTCLSLFFHFLSETLDNIFIFYLVSIFQFSSKFVHFAISFMFPSLSFFFCFILSRFKFIFFSSKKYVFIFLISLSFIFF

SEQ ID NO: 10413 - protein, 116 aa, Homo sapiens
  DOMAIN (42)..(70): !!!! PROTEIN ALU SUBFAMILY WARNING ENTRY NUCLEAR PHOSPHO domain identified by eMATRIX, accession number PD02454B, p-value= 8.085e-26, raw score of 11.61
  misc_feature (1)...(116): Xaa = X or * as defined in Table 2
GYGRRSVKVRAWARCTGFSPKTPNPWVNSQHFGRLRWADHLRSGVRDQPGQHGETLSLLKIQKLPGCGGRCLXFQLFGRLRQENXIRLNPGGGGCSELRSHHCTPAWVTEQDSVSK

SEQ ID NO: 10414 - protein, 54 aa, Homo sapiens
VRSLVISMTCKTAVSFLTSRVCSNRHGLIRKYGLNMCRQCFRQYAKDIGFIKLD

SEQ ID NO: 10415 - protein, 73 aa, Homo sapiens
CTAESKMGHQQLYWSHPRKFGQGSRSCRVCSNRHGLIRKYGLNMCRQCFRQYAKDIGFIKKDLSCLPWHCLWR

SEQ ID NO: 10416 - protein, 126 aa, Homo sapiens
SFLLLPRCTAEKQRWGHQQLYWSHPRKFGQGSRSCRVCSNNRHGLIRKYGLNMCRQCFRQYAKDIRFHLSWTKCSSFRGLSGASTSMKKPWINSFVYIIIHFEKATEKKRKKNEIKRGPFCFKGPL

SEQ ID NO: 10417 - protein, 153 aa, Homo sapiens
  DOMAIN (31)..(53): Globins profile domain identified by eMATRIX, accession number BL01033A, p-value=7.923e-18, raw score of 16.94
QPQTDTMVHLTPEEKTAVNALWGKVNVDAVGGEALGRLLVVYPWTQRFFESFGDLSSPDAVMGNPKVKAHGKKVLGAFSDGLAHLDNLKGTFSQLSELHCDKLHVDPENFRLLGNVLVCVLARNFGKEFTPQMQAAYQKVVAGVANALAHKYH

SEQ ID NO: 10418 - protein, 201 aa, Homo sapiens
  DOMAIN (58)..(80): Globins profile domain identified by eMATRIX, accession number BL01033A, p-value=7.923e-18, raw score of 16.94
PLKRSDGCNDGRPTRPPTRPDTTVFTSNLKQTRMVHLTPEEKSAVTALWGKVNVDEVGGEALGRLLVVYPWTQRFFESFGDLSTPDAVMGNPKVKAHSKKGLRGAFSDGLAHLDNLKGTFATLSELHCDKAAPWIPEELQAPWATCLVCVAWPITFGKRISTPPVAGLPNQENWLAWCWLNALGPTSNHLSLAFLAGPISN

SEQ ID NO: 10419 - protein, 168 aa, Homo sapiens
  DOMAIN (79)..(95): BETA HAEMOGLOBIN SIGNATURE domain identified by eMATRIX, accession number PR00814B, p-value=3.250e-17, raw score of 9.18
SAQMAVTTADPRVRPRVRTQLCSLASLIQTLLVHLTPEEKSAVTALWGKVNVDEVGGKALGRLLVVYPWTQRFLESFGDLSTPDAVMGNPKVKAHSKKVLGAFSGGPGCTWDNLKGTFAHTEVSLHCDKLHRGSLKNFRLLGQRAWSVVAGPIHFWQKNFNPTSCRLA

SEQ ID NO: 10420 - protein, 109 aa, Homo sapiens
GRGGPAAEPCSGEAPPPCFPWPSRGRARTRPSRAGSPPLDSCDPHRTPTRARRMMKLKSNQTRTYDGDGYKKQASYFETLRQGYSANNGTPVVATTYSVSAQSSMSGIR

SEQ ID NO: 10421 - protein, 223 aa, Homo sapiens
RRSSPSLLPLAERGGARARGRPERAPHPSTPATRTAPPPWARRMMKLKSNQTRTYDGDGYKKRAACLCFRSESEEEVLLVSSSRHPDRWIVPWKEGMEARRKEAKCGKQVREVCEGRLGVKGTLGRLVGIFENQERKHRTYVYVLIVTEVLEDWEDSVNIGRKREWFKIEDAIKVLQYHKPVQASYFETLRQGYSANNGTPVVATTYSVSGFRASMFRAFRWT

SEQ ID NO: 10422 - protein, 115 aa, Homo sapiens
PSFHYAVLPLHNCLGFFPSLRHRWLHSMTDDPPTTKPLTARKFIWTNHKFNVTGPQNNMYLILPLERRFRSGSHLQHLTSKDNEEQLKHAKYGAFHVITLLLFTIHYNSQLKLCD

SEQ ID NO: 10423 - protein, 101 aa, Homo sapiens
RQQAIFWHRWLHSMTDDPPTTKPLTARKFIWTNHKFNVTGPQNNMYLILPLERRFRSGSHLQHLTSKDNEEQLKHAKYGAFHVITLLLFTIHYNSQLKLCD

SEQ ID NO: 10424 - protein, 119 aa, Homo sapiens
  misc_feature (1)...(119): Xaa = X or * as defined in Table 2
KNFFFLEMEFSVLLPRLECNGVISAHRRLRLPLSSYSPASSSQVAGDYRACTTTAGXILYFXXETGFLHVGQAGLEFPTSGDQPALASQSAGITGVSHCPQLKKSILHETPKGLTGVTS

SEQ ID NO: 10425 - protein, 57 aa, Homo sapiens
  misc_feature (1)...(57): Xaa = X or * as defined in Table 2
LQEXSRRPSRSEAADLHGECYSSXGSTSGVVCSSRWARGLAGLRSEAADLRSEYYSS

SEQ ID NO: 10426 - protein, 115 aa, Homo sapiens
MAKTHFWDVDGSMVPPEWHRWLHSMTDDPPTTKPLTARKFIWDGTIKFQRGLGHPRNNMYLILPLERRFRSGSHLQHLTSKDNEEQLKHAKYGAFHVITLLLFTIHYNSQLKLCD

SEQ ID NO: 10427 - protein, 167 aa, Homo sapiens
  DOMAIN (52)..(69): BETA HAEMOGLOBIN SIGNATURE domain identified by eMATRIX, accession number PR00814A, p-value=6.250e-16, raw score of 12.94
NFALEAKNSARAISSYVQTPMGHFTRGGPRLTITSLWGKVNVEDAGGETPGKGSLVVYPWTQRFFDSFGNLSSAFCPSWPTPKVKAHGKKVLTSLGDAHKSTWDDLKGHLLPKPEVNCTVDKPAMWDPENFKAPGEMLLVTRFGQSLFRQKNFTPEGCRASLGKKDG

SEQ ID NO: 10428 - protein, 149 aa, Homo sapiens; identical to SEQ ID NO: 8286
  DOMAIN (33)..(55): Globins profile domain identified by eMATRIX, accession number BL01033A, p-value=3.250e-20, raw score of 16.94

SEQ ID NO: 10429 - protein, 207 aa, Homo sapiens
  DOMAIN (40)..(62): Globins profile domain identified by eMATRIX, accession number BL01033A, p-value=4.857e-17, raw score of 16.94
TLLVPQDSERTHPWLLSPADKTNVKAAWGKVGAHAVRSMCAEALERMFLSFPTTKTYFPHFDLSHGSAQVKGATGKKVADALTKRRGAPLDDMPNALSSALEATLHAHKLRVGPGSTSKLLKPLACLVDPGPAHLPRPSSTPGGCNVFPGTKFPGLFVEAPLLEPSKLPLKLGSLRLAIVFLPLWGFPPAPPPLSCTRTPVVFEIKS

SEQ ID NO: 10430 - protein, 91 aa, Homo sapiens
  DOMAIN (30)..(47): ISLET AMYLOID PROTEIN (AMYLIN) SIGNATURE domain identified by eMATRIX, accession number PR00818B, p-value=3.057e-23, raw score of 6.95
EAMGILKLQVFLIVLSVALNHLKATPIESHQVEKRKCNTATCATQRLANFLVHSSNNLGGILSSTNVGSNTYGKRNAVEVLKREPLNYLPL

SEQ ID NO: 10431 - protein, 508 aa, Homo sapiens
  DOMAIN (45)..(66): ANGIOTENSINOGEN SIGNATURE domain identified by eMATRIX, accession number PR00654A, p-value=1.540e-26, raw score of 15.64
IGHRDPARGRSCRCSGYYSRMVCEKLAPQSEMASAGVSLRATILCLLAWAGLAAGDRVYIHPFHLVIHNESTCEQLAEANAGKPKDPTFIPAPIQAKTSPVDEKALQDQLVLVAAKLDTEDKLRAAMVGMLANFLGFPYYMGMHSELWGVVHGATVLSPTAVFGTLASLYLGALDHTADRLQAILGVPWKDKNCTSRLDAHKVLSALQAVTGLLVAPGRADKQAQLLLSTVVGVFTAPGLHLKQPFVQGLALYTPVVLPRSLDFTELDVAAETIDRLMQAVTGWKTGCSLTGAKADSTLAFNTYVHFQGKMKGFSLLAEPQEFWVDNSTSVSVPMLSGMGTFQHWSDIQDNFSVTQVPFTDSAFLLLIQPHYASDLDKVEGLTFQQNSFNWMRKLFPRTIHLTMPQLVLQGSYDLQDLLRPGSSCPPFLHTELNLGRISGNDRIRVGEVLNSIFFELEADEREPTESTQQLNKPEVLEVPLTRPFLFAVYDQGATALALSWGRVGKPA

SEQ ID NO: 10432 - protein, 65 aa, Homo sapiens
  misc_feature (1)...(65): Xaa = X or * as defined in Table 2
MHVFLKLSVGVTQMVLISEAEKLTGXXXXXXXXXXXXXXXXXXXXXXXXXXXXXXQAGRHAGKQG

SEQ ID NO: 10433 - protein, 242 aa, Homo sapiens
  DOMAIN (56)..(75): Eukaryotic  RNA-binding region RNP-1 proteins domain identified by eMATRIX, accession number BL00030A, p-value=4.429e- 09, raw score of 14.39
HEASCRSERRRQMADFDTYDDRAYSSFGGGRGSRGSAGGHGSRSQKELPTEPPYTAYVGNLPFNTVQGDIDAIFKDLSIRSVRLVRDKDTDKFKGFCYVEFDEVDSLKEALTYDGALLGDRSLRVDIAEGRKQDKGGFGFRKGGPDDRGFRDDFLGGRGGLSRPGDRRTGPPMGSRFRDGPPLRGSNMDFREPTEEERAQRTTTPALKPRTVATPLNQVANPNSSIFGGARPREEVVQKEQE

SEQ ID NO: 10434 - protein, 287 aa, Homo sapiens
MVPSEGLWRGLREMLDQSNQWGGTALVVPAFEIRRARRMPMNKNELVQLYQVGEVRPFYYGLCTPCQAPTNYSRWVNLPEESLLRPAYVYFQARLAGAGNSTARILSTNHTGPEDAFNFNNWVTLLSQLPLLLFTLLNSFLYQCVPETMAKLRPREERILSEAPQWLLGHGEGSLPKARTVPEASSSHHVPTGEGAGADEFLPLLSLVLAHCDLPELLLEAEYMSELLEPSLLTGEGGYYLTSLSASLALLSGLGQAHTLPLSPVQELRRSLSLWEQRRLPATHCFQ

SEQ ID NO: 10435 - protein, 692 aa, Homo sapiens
  DOMAIN (15)..(25): N-acetyl-gamma-glutamyl-phosphate reductase proteins domain identified by eMATRIX, accession number BL01224B, p-value=3.930e- 09, raw score of 8.86
MVKAQLRTALASGGVLDASGDYRVYRGLLKTTMDPNDVILATHASVDNLLHLSGLLERWEGPLSVSVFAATKEEAQLATVLAYALSSHCPDMRARVAMHLVCPSRYEAAVPDPREPGEFALLRSCQEVFDKLARVAQPGINYALGTNVSYPNNLLRNLAREGANYALVIDVDMVPSEGLWRGLREMLDQSNQWGGTALVVPAFEIRRARRMPMNKNELVQLYQVGEVRPFYYGLCTPCQAPTNYSRWVNLPEESLLRPAYVVPWQDPWEPFYVAGGKVPTFDERFRQYGFNRISQACELHVAGFDFEVLNEGFLVHKGFKEALKFHPQKEAENQHNKILYRQFKQELKANWLRYSPELGVGGSGPASPLARRGEMAADEGHRLQSTEPSGPSLQAEGLRECRPVTMETGPRYPSMPRDQTVQLVQMPVQPPSKDTEEMEAEGDSAAEMNGEEEESEEERSGSQTESEEESSEMDDEDYERRRSECVSEMLDLEKQFSELKEKLFRERLSQLRLRLEEVGAERAPEYTEPLGGLQRSLKIRIQVAGIYKGFCLDVIRNKYECELQGAKQHLESEKLLLYDTLQGELQERIQRLEEDRQSLDLSSGPYIVYMLQEIDILEDWTAIKKPGGPSEQLALHPGFSSSSCRQADPQAPQGLPSQAPVVLLGPPTPSGTGLDSSSALLEACTAVAVELT

SEQ ID NO: 10436 - protein, 137 aa, Homo sapiens
MAGCRSRALPHGEAAKAQRKVTAAAGPGAKHLTAWGWQGQLATPSVGPAEPTHTQNSHWPASAVCSPSSRLRLSLHTYPQAEGAGSGLGQPRKGLPQCSSRLKGSSSAAKVGAQAEEVPRASEACEGCQHAVTSHKY

SEQ ID NO: 10437 - protein, 490 aa, Homo sapiens
SDGRCGRCCAPRAPRAMHMSFAISRCAFYQLLLAALMLVAMLQLLYLSLLSGLHGQEEQDQYFEFFPPSPRSVDQVKAHVRTALASGGVLDVSGDYRVYRGLLKTTMDPNDVILATHASVEQTCLHLSGLLERWEGPAVPCSVFAATKEEAQLATVLAYALSSHCPDMPARVAMHLVCPSRYEAAVPDPREPGEFALLRSCQEVFDKLARVAQPGINYALGTNVSYPNNLLRNLAREGANYALVIDVDMVPTEGLWRGLREMLDQSNQWGGTALVVPAFEIRRARRMPMNKNELVQLYQVGEVRPFYYGLCTPCQAPTNYSRWFNLPEESLLRPAYVVPWQDPWEPFYVAGGKVPNFRRSGFRQYGFNRISQACELHVGGFDFEVLNEGFLVHKGFKEALKFHPQKEAENQHNKILYRQFKQELKAKYPNSPRRRAQLATVLAYALSSHCPDMPARGRHAPRVPLALRGSRARPPGAGGVCPAAVLPGGL

SEQ ID NO: 10438 - protein, 94 aa, Homo sapiens
PPGRTAILSRMKIFLPVLLAALLGVERASSLMCFSCLNQKSNLYCLKPTICSDQDNYCVTVSASAGIVNLVTFGHSLSKTCFPGCPIPESGNVG

SEQ ID NO: 10439 - protein, 191 aa, Homo sapiens
RTAILSRMKIFLPVLLAALLGVERASSLMCFSCLNQKSNLYCLKPTICSDQDNYCVTVSASAGIGNLVTFGHSLSKTCFPCLAPFPEGRSMLGVASMGHSAFCQSFLVAIFSCGPMAGLRGKRSPLLGARACCLSLAGRALLRFGPLDRPEPCSPDPPAQEGKPSPFWIPQCMGAPDSSRALICALGPRSG

SEQ ID NO: 10440 - protein, 46 aa, Homo sapiens
PSLLQVAKQEKKKKKTGRAKRRMQYNRRFVNVVPTFGKKKGPNANS

SEQ ID NO: 10441 - protein, 312 aa, Homo sapiens
  DOMAIN (109)..(128): Eukaryotic  RNA-binding region RNP-1 proteins domain identified by eMATRIX, accession number BL00030A, p-value=8.615e- 14, raw score of 14.39
PQHGGHFPRKIKSCSWQARPLEDEATLGQCGVEALTTLEVTRPACLEVKSMVPWPVLEKVRGQTPKVAKHGEKKKKKTGRAKRRMQYNRRFVNVVPTFGKKKGTTFTKIFVGGLPYHTTDASLRKYFEGFGDIEEAVVITDRQTGKSRGYGFVTMADRAAAERACKDPNPIIDGRKANVNLAYLGAKPWCLQTGFAIGVQQLHPTLIQRTYGLTPNYMYPPAIVQATVVIPAAPVPSLSSPYIEYTPASPAYAQYPPATYDQYPYAASPATVRSFVGYSYPAAVPQALSAAAPAGTTFLQYQAPHVQPDRMH

SEQ ID NO: 10442 - protein, 135 aa, Homo sapiens
  misc_feature (1)...(135): Xaa = X or * as defined in Table 2
DAERQEALGIVRRIGTDTEAATEPAGATVPAAAAAARIGTVGPQPPAMPRRKRNAGSSSDGTEDSDFSTDLEHTDSSESDGTSRRSARVTRSSARLSQSSSRISRSCSKSGSLLALRSLLTLPEEXPVVSSSLPQ

SEQ ID NO: 10443 - protein, 81 aa, Homo sapiens
  misc_feature (1)...(81): Xaa = X or * as defined in Table 2
XSYLLGQWPRDADGAFTCCTNDKATQTPLSWQELEGERASSCAHKRSASWGSTDHRKEISKLKQQLQRTKLSRSGKEKERX

SEQ ID NO: 10444 - protein, 1360 aa, Homo sapiens
GHPAFLEDGSPSPVLAFAASPRPNHSYIFKREPPEGCEKVRVFEEATTRGKYGEGAKQETFTFALTLVFIQCVINAVFAKILIQFFDTARVDRTRSWLYAACSISYLGAMVSSNSALQFVNYPTQVLGKSCKPIPVMLLGVTLLKKKYPLAKYLCVLLIVAGVALFMYKPKKVVGIEEHTVGYGELLLLLSLTLDGLTGVSQDHMRAHYQTGSNHMMLNINLWSTLLLGMAVSCPDQGPELVPRCPFVQALEKPSWKNLHQQDLFATCYWHNEGESCVSCHGKTLSSKTQGGILFTGELWEFLSFAERYPAIIYNILLFGLTSALGQSFIFMTVVYFGPLTCSIITTTRKFFTILASVILFANPISPMQWVGTVLVFLGSTQIILDNLKILNTSAKTLLYKTPLSWQELEGERASSCAHKRSASWGSTDHRKEISKLKQQLQRTKLSRSGKEKERGSPLLGDHVSAGSTEGVPSRASPQGPLSCDSAPACTVSLEGLNQELEEVFVKEQGEEELLRILDIPDGHRAPAPPQSGSCDHPLLLLEPGNLASSPSMSLASPQPCGLASHEEHRGAAEELASTPNDKASSPGHPAFLEDGSPSPVLAFAASPRPNHSYIFKREPPEGCEKVRVFEEATTRGKYGEGAKQETFTFALTLVFIQCVINAVFAKILIQFFDTARVDRTRSWLYAACSISYLGAMVSSNSALQFVNYPTQVLGKSCKPIPVMLLGVTLLKKKYPLAKYLCVLLIVAGVALFMYKPKKVVGIEEHTVGYGELLLLLSLTLDGLTGVSQDHMRAHYQTGSNHMMLNINLWSTLLLGMAVSCPDQGPELVPRCPFVQALEKPSWKNLHQQDLFATCYWHNEGESCVSCHGKTLSSKTQGGILFTGELWEFLSFAERYPAIIYNILLFGLTSALGQSFIFMTVVYFGPLTCSIITTTRKFFTILASVILFANPISPMQWVGTVLVFLGSTQIILDNLKILNTSAKTLLYKTPLSWQELEGERASSCAHKRSASWGSTDHRKEISKLKQQLQRTKLSRSGKEKERGSPLLGDHAVRGALRASPPSFPSGSPVLRLSPCLHRSLEGLNQELEEVFVKEQGEEELLRILDIPDGHRAPAPPQSGSCDHPLLLLEPGNLASSPSMSLASPQPCGLASHEEHRGAAEELASTPNDKASSPGHPAFLEDGSPSPVLAFAASPRPNHSYIFKREPPEGCEKVRVFEEATHQRRDSFDIREKVAELRKKRNSGLSKEQKEKYMEHRQTYGNTREPLLENLTSEYDLDLFRRAQARASEDLEKLRLQGQITEGSNMIKTIAFGRYELDTWYHSPYPEEYARLGRLYMCEFCLKYMKSQTILRRHMDGSGSL

SEQ ID NO: 10445 - protein, 165 aa, Homo sapiens
LSLGDSAQCLLPHASWCQVAGHPAFLEDGSPSPVLAFAASPRPNHSYIFKREPPEGCEKVRVFEEATSRRVLTGPFLTSCPDKNKVHFQPTGSAFCPVNLMKPLFPGMGFIFRNCPSNPGISSSPGQPQATTSEGSGSLQGLPTAIRAMAVAPHLQMSLCFSRAP

SEQ ID NO: 10446 - protein, 151 aa, Homo sapiens
  DOMAIN (17)..(52): Matrix protein (MA) p15. domain identified by eMATRIX, accession number PF01140D, p-value=2.047e-09, raw score of 15.54
GGILEELERRRKEEEERRRAEEEKRRVEREQECRWREMEEHRQAERLQRQLQQEQAYLLSLQHDHRRPHPQHSQQPPPPQQERSKPSFHAPEPKAHYEPADRAREVPVRTTSRSPVLSRRDSPLQGSGQQNSQAGQRNSTSIEPRLLWERV

SEQ ID NO: 10447 - protein, 40 aa, Homo sapiens
GAPPPAPWRPVPSTTQGLRSASAQRGTGRQLHLQPGCGIH

SEQ ID NO: 10448 - protein, 54 aa, Homo sapiens
SGERFRVRSSSKSEGSPSQRLENAVKKPEDKKEVFRPLKPAVRIVQDQFYLFQT

SEQ ID NO: 10449 - protein, 145 aa, Homo sapiens
  misc_feature (1)...(145): Xaa = X or * as defined in Table 2
ARAARVFLHRSSLNLSNGETESVKTMIVHDDVESEPAMTPSKEGTLIVRQTQSASSTLQKHKSSSSFTPFIDPRLLQISPSSGTTVTSVVGFSCDGMRPEAIRQDPTRKGSVVNVNPTNIRPQSDPPEIRKSGKGXLXILGAGLW

SEQ ID NO: 10450 - protein, 56 aa, Homo sapiens
RAVEDVRPSHKVTDYSSSSEESGTTDEEDDDVEQEGADESTSGPEDTRAASVPGLF

SEQ ID NO: 10451 - protein, 1658 aa, Homo sapiens
  DOMAIN (644)..(679): Matrix protein (MA) p15. domain identified by eMATRIX, accession number PF01140D, p-value=6.760e-11, raw score of 15.54
RRTSAVSRGLLFMSFVQPLLQPPVHLLTARVRVPGYLQIDGVKIKEHNGKLMNCFKTKMTYYSFMKCVGLPAQLTIGFSGPSRETGSDPRAARRGEDPQSKDRGDGLSEQTEAQRSGVHCPRSQLVGELAGQSPRTIPAALRVCLYLLCITSYNHTSKDESSKDEEEEIKLEINMLKKYSHHRNIATYYGAFIKKSPPGHDDQLWLVMEFCGAGSITDLVKNTKGNTLKEDWIAYISREILRGLAHLHIHHVIHRDIKGQNVLLTENAEVKLDHHHHPIGWDAEVTEKSAEVPSALGSLKALKVVVHSKGPLLVTVGEAGEAARSRPHRSFQTVDFGVSAQLDRTVGRRNTFIGTPYWMAPEVIACDENPDATYDYRSDLWSCGITAIEMAEGAPPLCDMHPMRALFLIPRNPPPRLKSKKWSKKFFSFIEGCLVKNYMQRPSTEQLLKHPFIRDQPNERQVRIQLKDHIDRTRKKRGEKDETEYEYSGSEEEEEEVPEQEGEPSSIVNVPGESTLRRDFLRLQQENKERSEALRRQQLLQEQQLREQEEYKRQLLAERQKRIEQQKEQRRRLEEKLLEDVFQQSKKEDDKDSREVCGQKYRMTGKQSVSKNKERIPDFFNCVERSVMQQRREREARRQQEREQRRREQEEKRRLEELERRRKEEEERRRAEEEKRRVEREQEYIRRQLEEEQRHLEVLQQQLLQEQAMLLECRWREMEEHRQAERLQRQLQQEQAYLLSLQHDHRRPHPQHSQQPPPPQQERSKPSFHAPEPKAHYEPADRAREVEDRFRKTNHSSPEAQSKQTGRVLEPPVPSRSESFSNGNSESVHPALQRPAEPQDPCPPSRSEVLSQSSDSKSEAPDPTQKAWSRSDSDEVPPRVPVRTTSRSPVLSRRDSPLQGSGQQNSQAGQRNSTSSIEPRLLWERVEKLVPRPGSGSSSGSSNSGSQPGSHPGSQSGSGERFRVRSSSKSEGSPSQRLENAVKKPEDKKEVFRPLKPAGEVDLTALAKELRAVEDVRPPHKVTDYSSSSEESGTTDEEDDDVEQEGADESTSGPEDTRAASSLNLSNGETESVKTMIVHDDVESEPAMTPSKEGTLIVRQSTVDQKRASHHESNGFAGRIHLLPDLLQQSHSSSTSSTSSSPSSSQPTPTMSPQTPQDKLTANETQSASSTLQKHKSSSSFTPFIDPRLLQISPSSGTTVTSVVGFSCDGMRPEAIRQDPTRKGSVVNVNPTNTRPQSDTPEIRKYKKRFNSEILCAALWGVNLLVGTESGLMLLDRSGQGKVYPLINRRRFQQMDVLEGLNVLVTISGKKDKLRVYYLSWLRNKILHNDPEVEKKQGWTTVGDLEGCVHYKVVKYERIKFLVIALKSSVEVYAWAPKPYHKFMAFKSFGELVHKPLLVDLTVEEGQRLKVIYGSCAGFHAVDVDSGSVYDIYLPTHIQCSIKPHAIIILPNTDGMELLVCYEDEGVYVNTYGRITKDVVLQWGEMPTSVAYIRSNQTMGWGEKAIEIRSVETGHLDGVFMHKRAQRLKFLCERNDKVFFASVRSGGSSQLQNSLSLNDSVLWVSDSGDDEHAVGFIGSGHKEAFHKMKHATVNTLVYISREEGKAQVENSKRPGRHDRRRANLGPCSQCWHLALVSRAARAASSSIRHINKPLRVSS

SEQ ID NO: 10452 - protein, 45 aa, Homo sapiens
DPVSKKKEKKRKKKKGQAQWLTPVIPTLWEAEVGGSPEVRSSRPA

SEQ ID NO: 10453 - protein, 596 aa, Homo sapiens
MPVIPATQEAEAEESLDPGRRRLRTIGKLEPSYVIRKFLDAQRIHNLTAYLQTLHRQSLANADHTTLLLNCYTKLKDSSKLEEFIKKKSESEVHFDVETAIKVLRQAGYYSHALYLAENHAHHEWYLKIQLEDIKNYQEALRYIGKLPFEQAESNMKRYGKILMHHIPEQTTQLLKGLCTDYRPSLEGRSDREAPGCRANSEEFIPIFANNPRELKAFLEHMSEVQPDSPQGIYDTLLELRLQNWAHEKDPQVKEKLHAEAISLLKSGRFCDVFDKALVLCQMHDFQDGVLYLYEQGKLFQQIMHYHMQHEQYRQVISVCERHGEQDPSLWEQALSYFARKEEDCKEYVAAVLKHIENKNLMPPLLGTWEDRWDELRVRRYREETTRIRQEIQELKASPKIFQKTKCSICNSALELPSVHFLCGHSFHQHCFESYSESDADCPTCLPENRKVMDMIRAQEQKRDLHDQFQHQPPKDDKKKKDAGKSAKKDKDPVNKSGGKAKKKKWSKGKVRDKLNNLVLFDKATYDKLCKEVPNYKLITPAVVSERLKIRGSLARAALQELLSKGLIKLVSKHRAQVIYTRNTKGGDAPAAGEDA

SEQ ID NO: 10454 - protein, 35 aa, Homo sapiens
HAYEGLIKLVSKHRAQVIYTRDTKGGDAPAAGEDA

SEQ ID NO: 10455 - protein, 68 aa, Homo sapiens
  misc_feature (1)...(68): Xaa = X or * as defined in Table 2
HEELKSGPYYLLTFRDCFLHFWALVSKRLALNFMXTSAPTXKALSKRNICLVNKNRNIKIPYPKKKKK

SEQ ID NO: 10456 - protein, 75 aa, Homo sapiens
  DOMAIN (1)..(29): !!!! PROTEIN ALU SUBFAMILY WARNING ENTRY NUCLEAR PHOSPHO domain identified by eMATRIX, accession number PD02454B, p-value= 9.491e-23, raw score of 11.61
  misc_feature (1)...(75): Xaa = X or * as defined in Table 2
RSGVRDQPGQHGKITSLLKIQKLARRGGACLXSQLLRRLRQENRLNPGGGGCSEPRSCHCTPAWETEQDSISKIK

SEQ ID NO: 10457 - protein, 392 aa, Homo sapiens; identical to SEQ ID NO: 10246
  DOMAIN (317)..(368): Porphobilinogen deaminase cofactor-binding site proteins domain identified by eMATRIX, accession number BL00533B, p-value= 1.000e-40, raw score of 22.89

SEQ ID NO: 10458 - protein, 1136 aa, Homo sapiens
MSEAPRFFVGPEDTEINPGNYRHFFHHADEDDEEEDDSPPERQIVVGICSMAKKSKSKPMKEILERISLFKYITVVVFEEEVILNEPVENWPLCDCLISFHSKGFPLDKAVAYAKLRNPFVINDLNMQYLIQDRREVYSILQAEGILLPRYAILNRDPNNPKGVKLQTFAVSVTALKVARLELFVPPGGLLVLLGSGVKLQIFAGCRWSCLPVTRRVLALLSPWVVDGTGRRGAGGGARWGGSGRTGAHGVECNLIEGEDHVEVNGEVFQKPFVEKPVSAEDHNVYIYYPTSAGGGSQRLFRKIGSRSSVYSPESNVRKTGSYIYEEFMPTDGTDVKVYTVGPDYAHAEARKSPALDGKVERDSEGKEVRYPVILNAREKLIAWKVCLAFKQTVCGFDLLRANGQSYVCDVNGFSFVKNSMKYYDDCAKILGNIVMRELAPQFHIPWSIPLEAEDIPIVPTTSGTMMELRCVIAVIRHGDRTPKQKMKMEEVLDIARQLLMELGQNNDSEIEENKPKLEQLKTVLEMYGHFSGINRKVQLTYLPHGCPKTSSEEEDSRREEPSLLLVLKWGGELTPAGRVQAEELGRAFRCMYPGGQGDYAGFPGCGLLRLHSTYRHDLKIYASDEGRVQMTAAAFAKGLLALEGELTPILVQMVKSANMNGLLDSDSDSLSSCQQRVKARLHEILQKDRDFTAEDYEKLTPSGSISLIKSMHLIKNPVKTCDKVYSLIQSLTSQIRHRMEDPKSSDIQLYHSETLELMLRRWSKLEKDFKTKNGRYDISKIPDIYDCIKYDVQHNGSLKLENTMELYRLSKALADIVIPQEYGITKAEKLEIAKGYCTPLVRKIRSDLQRTQDDDTVNKLHPVYSRGVLSPERHVRTRLYFTSESHVHSLLSILRYGALCNESKDEQWKRAMDYLNVVNELNYMTQIVIMLYEDPNKDLSSEERFHVELHFSPGAKGCEEDKNLPSGYGYRPASRENEGRRPFKIDNDDEPHTSKRDEVDRAVILFKPMVSEPIHIHRKSPLPRSRKTATNDVVSENANYLRTPRTLVEQKQNPTVASTALRSSPIMRKKVSLNTYTPAKILPTPPATLKSTKASSKPATSGPSSAVVPNTSSRKKNITSKTETHEHKKNTGKKK

SEQ ID NO: 10459 - protein, 49 aa, Homo sapiens
GPGCIPAALLQPPKDDKKKKDAGKSAKKDKDPVNKSGGKAKKKVEIRPL

SEQ ID NO: 10460 - protein, 81 aa, Homo sapiens
  misc_feature (1)...(81): Xaa = X or * as defined in Table 2
GPAPTRRGPAPHGAHTRXXPAGTARAACGSAXSAGTASPAHKGKGHHPGSRASGTGPGPCQRRRRSDHSSAGKWPLREASL

SEQ ID NO: 10461 - protein, 147 aa, Homo sapiens
AALRSSENSSRHRSLVKMSDKKAKDPVNKSGGQGPKRKNWSKGKSSGTSFNNLVLFDKATYDKLCKEVPNYNLITPAVGSERLKIRGSLGQGKPFQELLSKGFIPNWFSKHRASSYFTPGITKGGDAPSLLGEDCMNRSNPPVHLEK

SEQ ID NO: 10462 - protein, 173 aa, Homo sapiens
APSPRRPWGHFTEEDKATIKNLWGKGEMWKDAGGKNPWERLPWLSYPMGPQRFFDQLLANLSLCPLPIMGNPPKVKGTWPRKVLTSLGSAHKSTWDDLKGHLLPKPEVNLHCDKPAMWDPENFKAPGEMLLVTRFGQSHFRQKNFTPGGCRASWGRKMGDLELASALVPSRYH

SEQ ID NO: 10463 - protein, 65 aa, Homo sapiens
  misc_feature (1)...(65): Xaa = X or * as defined in Table 2
KCIHFPGPTPKFVCGVIVVTAVPTFGMXTVYVXXLPFSILAQNVGXRDDCDPGWKLNLFYAKKKK

SEQ ID NO: 10464 - protein, 95 aa, Homo sapiens
HITNIDPSAINKSGQETWPHGVGLGTALLGRGPSAMLWGALGPDLSRLWAAVSELRAQPAHTGAHRTATSSQKLQKSGPRRGPQEQVPPADRETQ

SEQ ID NO: 10465 - protein, 130 aa, Homo sapiens
  DOMAIN (53)..(77): GTP-BINDING SAR1 PROTEIN SIGNATURE domain identified by eMATRIX, accession number PR00328A, p-value=5.213e-11, raw score of 10.62
QEQDQVFHTRDQAKTRLPLPLLGPHCPQKAAAVIMGNIFGNLLKSLIGKKEMRILMVGLDAAGKTTILYKLKLGEIVTTIPTIGFNVETVVAVLLASESFPCPHKPFYSLFAFPLPPSPCFTWKLHGPLC

SEQ ID NO: 10466 - protein, 1184 aa, Homo sapiens
  DOMAIN (830)..(876): Wnt-1 family proteins domain identified by eMATRIX, accession number BL00246E, p-value=1.000e-40, raw score of 20.32
EPSSQSKPGKEQGEGATVFPSPCQKRLSSSRLLHQPDGGRGGEAEGGRPGDSTLEERTFRILGLPAPEVNLRDAPTQPGSPEHQALGPAASGAQGRAEGSEVAVVQRRAGRGWARTPGPYAGALREAVSGIRRHTAPDSDTDEAEELSVHSGSSDGSDTEAPGASWRNERTLPEVGNSSPEEDGKTAELSDSVGEILDVISQTEEVLFGDKSSLVGLPPSKLSGPILGPGSFPSDDRLSRPPPPATPSSMDVNSRQLVGGSQAFYQRAPYPGSLPLQQQQQQLWQQQQATAATSMRFAMSARFPSTPGPELGRQALGSPLAGISTRLPGPGCNCAESCCFFCSSFFSCSNRSSMSRGNSLATSELSILSSSSPDAAGPPGKVKAPLSSSNFSSREDPPGPLSGLGVSSFCEDVAVLWAPVCAGCALSSETAAHNLLRKPGNDSKMLVCETCDKGYHTFCLKPPMEELPAHSWKCKACRVCRACGAGSAELNPNSEWFENYSLCHRCHKAQGGQTIRSVAEQHTPPRMLRLFLQSRSPGECMQAVEPLHRGRLEQAADEGFDCVSCQPYVVKPVAPVAPPELVPMKVKEPAFSESLLHAKLVGYTELNQLNHLQQLMVQQGIPQADAVVQYDVELIALIRANYWLKLVKGILPLKEKMAKTPLSDEKQLLLFQQKLLAEEEMAKKKERLLSQFLKNNLSNPPTPPSSLPPTPPPSVQQKMVNGVTPSEELGEHPKDAASARDSERALRETRRFSTAGTGFRLLFHNAHANSRAWLLPAPLDPRPILCFAYTWRAVYQPPRVTMETGASASIPELICEAMRRIWSSSPALDGCELLCCGRGHRTRTQRVTERCNCTFHWCCHVSCRNCTHTRVLHECLGIVNVASSTNLLTDSKSLQLVLEPSLQLLSRKQRRLIRQNPGILHSVSGGLQSAVRECKWQFRNRRWNCPTAPGPHSSARSSTEPQHCGTYYLPPSHSLFDAVSSLIRNKIHRLPVIDPESGNTLYILTHKRILKFLKLFKAAAVIMGNIFGNLLKSLIGKKEMRILMVGLDAAGKTTILYKLKLGEIVTTIPTIDEENKERRQAILQETCNWPHTLNSTSMSKAYQSTFTGETNTPYSKQFVHSKSSQYRRLRTEWKNNVYLARSRIQGLGLYAAKDLEKHTMVIEYIGTIIRNEVANRREKIYEEQ

SEQ ID NO: 10467 - protein, 71 aa, Homo sapiens
HMPLIGHHSHGWSQALLEGMSWWLGGHQWLGQTWLSGTCKTQGKLLLGPSQTGRRALMWQRHGLGRAWCRQ

SEQ ID NO: 10468 - protein, 252 aa, Homo sapiens
ERGGFFSPEPGEPDSPWTGSGGTTPSTPTTPTTEGEGDGLSYNQRSLQRWEKDEELGQLSTISPVLYANINFPNLKQDYPDWSSRCKQIMKLWRKVPAADKAPYLPGSPEHQALGPAASGAQGRAEGSEVAVVQRRAGRGWARTPGPYAGALREAVSRIRRHTAPDSDTDEAEELSVHSGSSDGSDTEAPGASWRNERTLPEVGNSSPEEDGKTAELSDSVGEILDVISQTEEVLFGPPPIRGTQQGNRKRQ

SEQ ID NO: 10469 - protein, 147 aa, Homo sapiens
  misc_feature (1)...(147): Xaa = X or * as defined in Table 2
SFQGGLEGEAWAGTGAAPGACGPARVPGGRRLRGPRTRPAGPTGPGQXGVLAPGPAAAVLRFLTGPXLPSRSRARDREGLQLHSXSQRDHEPTGRNGTTPDAPPXELXHSPRRSAASLCPQAPEVSPQGSQVPALSGNSPQRLLLPT

SEQ ID NO: 10470 - protein, 170 aa, Homo sapiens
  DOMAIN (143)..(163): BETA-1 ADRENERGIC RECEPTOR SIGNATURE domain identified by eMATRIX, accession number PR00561F, p-value=9.214e-09, raw score of 9.39
RLFPVIIVAAPLLDSPWTSRPATGLAGSRTARVGRARDPHSRRPAGPGPPGCCRRRPTGGRGPWPRSELGSKRKGKRRRRSGRPRRPSEKGARLVGPDGAPRVDPARSPATPLGWPSWQGSLLPCGRSAWRLWGERPVHPRSRRATQGRRGRGPGEVGGPGPQATRLTCC

SEQ ID NO: 10471 - protein, 142 aa, Homo sapiens
GDWQEKVPRGKGAGRVLQEVGPRAVAHPDWRHCRYTCAEWVALGRGSPVSGGSRCLVASSGYSQPTLHQTASANQGQCLGSCLPDPFPSHQDPQLPPSLAQCLPGRGSLGTAPHRSWGSSCSAAPPLPPSRHSGSCLQQQRL

SEQ ID NO: 10472 - protein, 206 aa, Homo sapiens
  DOMAIN (109)..(130): ALPHAHERPESVIRUS ALKALINE EXONUCLEASE SIGNATURE domain identified by eMATRIX, accession number PR00924E, p-value=6.684e- 09, raw score of 12.09
  DOMAIN (62)..(195): CBS domain identified by PFam, accession name CBS, E-value=7e -08, PFam score of 39.6
FPCRPTRPPKARKPSRAPLAMETVISSDSSPAVENEHPQETPESNNSVYTSFMKSHRCYDLIPTSSKLVVFDTSLQVKKAFFALVTNGVRAAPLWDSKKQSFVGMLTITDFINILHRYYKSALVQIYELEEHKIETWREVYLQDSFKPLVCISPNASLFDAVSSLNSGTRSTSLAVIDPRIQAILCTILNPQAHSGSSSKLFNTGG

SEQ ID NO: 10473 - protein, 142 aa, Homo sapiens; identical to SEQ ID NO: 10471

SEQ ID NO: 10474 - protein, 358 aa, Homo sapiens
  DOMAIN (263)..(289): ADP-ribosylation factors family proteins domain identified by eMATRIX, accession number BL01019C, p-value=4.667e-22, raw score of 12.52
  DOMAIN (113)..(307): ADP-ribosylation factor family domain identified by PFam, accession name arf, E-value=9.5e-49, PFam score of 175.4
RSFRAIGEVGSIRGWGGGYAAQLQSPSRLPVLGGGKKGGSRGVGQGSSRAEVGLGSQRERSGTCGAEAAAAAAQLIAGTGSSLPYQGPGQNQTAIAPTCAPLSPCKAAAVIMGNIFGNLLKSLIGKKEMRILMVGLDAAGKTTILYKLKLGEIVTTIPTIGFNVETVEYKNISFTVWGCGVARDKIRPLWRHYFQNTQGFDILWSDSNDRERVNEAREELMKNAGAETSLRDAVLLVFGQTNRICPNAMNAAGIQDKLGLHSLRHRNWYIQATCATRGNGLYEGLHWLANSVPKQEVESRTALTKHSTSPLTYLLSPCPQFLPLLSMQGLARAWGIMSTLPSRTLPPLTSLPFSCPPI

SEQ ID NO: 10475 - protein, 94 aa, Homo sapiens
VTTENSGGQTQCGKQDRIQVPRHPARRGPPGSQYPVTPPVPPGPLHATQLPPGPIPLGKRKAGQERRLDPRPTTCQAAAPTRSSPFCPPQKVWR

SEQ ID NO: 10476 - protein, 46 aa, Homo sapiens
TISSIIRKARKPQDLLNNYTPRSSPLRSSGRTRMYKGKNVRPGNSS

SEQ ID NO: 10477 - protein, 472 aa, Homo sapiens
  DOMAIN (132)..(142): w KINASE ALPHA ADHESION T-CELL domain identified by eMATRIX, accession number DM00179, p-value=4.522e-09, raw score of 13.97
  DOMAIN (68)..(335): Immunoglobulin domain identified by PFam, accession name ig, E-value=1.2e-21, PFam score of 74.8
MAAALFVLLGFALLGTHGASGAGEERARKQPCGKSRFQGHSEGALATRFSAGNTGFVQAPLSQQRWVGGSVELHCEAVGSPVPEIQWWFEGQGPNDTCSQLWDGARLDRVHIHATYHQHAASTISIDTLVEEDTGTYECRASNDPDRNHLTRAPRVKWVRAQAVVLVLEPGTVFTTVEDLGSKILLTCSLNDSATEVTGHRWLKGGVVLKEDALPGQKTEFKVDSDDQWGEYSCVFLPEPMGTANIQLHGPPKVKAVKSSEHINEGETAMLVCKSESVPPVTDWAWYKITDSEDKALMNGSESRFFVSSSQGRSELHIENLNMEADPGQYRCNGTSSKGSDQAIITLRVRSHLAALWPFLGIVAEVLVLVTIIFIYEKRRKPEDVLDALRRCTWPGLMSCPEPPLGVTEGRAGSTDAPARGLSGASADRLSSRPLFHGGGPSSDDDAGSAPLKSSGQHQNDKGKNVRQRNSS

SEQ ID NO: 10478 - protein, 292 aa, Homo sapiens
SCRGRRRQRLEVVRGFRRGIGIMAAALFVLLGFALLGTHGASGAAGTVFTTVEDLGSKILLTCSLNDSATEVTGHRWLKGGVVLKEDALPGQKTEFKVDSDDQWGEYSCVFLPEPMGTANIQLHGPPRVKAVKSSEHINEGETAMLVCKSEFVPPVTDWAWYKITDSEDKALMNGSESRFFVNSSQGRSELHIENLNMEADPGQERCNGTSSKGLRPRPLQFLRVRSHLAALWPFLGIVGEVLVLVTIIFIYEKRRKPEDVLDDDDAGSAPLKSSGQHQNDKGKNVRQRNSS

SEQ ID NO: 10479 - protein, 42 aa, Homo sapiens
  misc_feature (1)...(42): Xaa = X or * as defined in Table 2
KWASNTYVISSNEESMISXLSGRQXNLRVWRLRKTWWLNWTL

SEQ ID NO: 10480 - protein, 101 aa, Homo sapiens
PCGGIRGGKEMNEIKTQFTTREGLYKLLPHSEYSRPNRVPFNSQGSNPVRVSFVNLNDQSGNGDRLCFNVGRELYFYIYKGVRKGSLSSSSQASSPGETVV

SEQ ID NO: 10481 - protein, 74 aa, Homo sapiens
  misc_feature (1)...(74): Xaa = X or * as defined in Table 2
GILKGLYYPLATNSFPATCWRLXVSPAHSKDPRNAATVHLSFFSPSGGPRYLLGHTTWQQGLGKRGRRTEQHSL

SEQ ID NO: 10482 - protein, 112 aa, Homo sapiens
FLLSSRWGWPSMASTAGCPQGQVCGMTGNAGVHNVGAALWHSLGWVKGEQNTKGPFGDQNRPVQAIWASPFRTSWVKFPRPWRQMPAILGPWGTYCLSLAREGERRPAAQSG

SEQ ID NO: 10483 - protein, 442 aa, Homo sapiens
  DOMAIN (66)..(121): S-adenosylmethionine synthetase proteins domain identified by eMATRIX, accession number BL00376A, p-value=1.000e-40, raw score of 10.62
  DOMAIN (64)..(438): S-adenosylmethionine synthetase domain identified by PFam, accession name S-AdoMet_synt, E-value=0, PFam score of 969.5
SKPPAASFAPRRPPATSRTLSAACAFRSRCRLAACSFVRPLPHTDTNMNGQLNGFHEAFIEEGTFLFTSESVGEGHPDKICDQISDAVLDAHLQQDPDAKVACETVAKTGMILLAGEITSRAAVDYQKVVREAVKHIGYDDSSKGFDYKTCNVLVALEQQSPDIAQGVHLDRNEEDIGAGDQGLMFGYATDETEECMPLTIVLAHKLNAKLAELRRNGTLPWLRPDSKTQVTVQYMQDRGAVLPIRVHTIVISVQHDEEVCLDEMRDALKEKVIKAVVPAKYLDDVTIYHLQPSGRFVIGGPQGDAGLTGRKIIVDTYGGWGAHGGGAFSGKDYTKVDRSAAYAARWVAKSLVKGGLCRRVLVQVSYAIGVSHPLSISIFHYGTSRKSERELLEIVKKNFDLRPGVIVRDLDLKKPIYQRTAAYGHFGRDSFPWEVPKKLKY

SEQ ID NO: 10484 - protein, 38 aa, Homo sapiens
TLHKKTFYYLEQLILKYGMHQNTLRIKEIHGELKLKSI

SEQ ID NO: 10485 - protein, 540 aa, Homo sapiens
MTEQLEPILMQAFIKSTAGLEARKLKAYRTMEYMAKSTDRSPGHILCCECGVPISPNPANICVACLRSKEDISQGIPKQVSISFCKQCQRYFQPPGTWIQCALESRGTFLLWCLEKNPKPLWSKVRLVDAGFVWTEPHFKRLKVKLTIQKEVMNGAILQQVFVVDYVVQSQMCGDGHESEKLKDFWKAVIQVRQKTLHKKTFYYLEQLILKYGMHQNTLRIKEIHDGLDFYYSSKQHAQKMVEFLQCTVPCRYKASQRLISQDIHSNTYNYKSTFSVEIVPICKDNVVCLSPKLAQSLGNMNQICVCIRVTSAIHLIDPNTLQVADIDGSTFWSHPFNSLCHPKQLEEFIVMECSIVQDIKRAAGAGMISKKHTLGEVWGTEGHLEMNYRIKQYFCRTHLGTSCLNPGDRVLGFDLANCNLNDEHVNKMNSDRVPDVVLIKKSYDRTKRQRRRNWKLKELARERENMDTDDERQYQDFLEDLEEDEAIRKNVNIYRDSAIPVESDTDDEGAPRISLAEMLEDLHFSPGCPLVKEGASMLT

SEQ ID NO: 10486 - protein, 214 aa, Homo sapiens
  DOMAIN (43)..(64): GTP1/OBG GTP-BINDING PROTEIN FAMILY SIGNATURE domain identified by eMATRIX, accession number PR00326A, p-value=6.250e- 11, raw score of 8.75
PKPGGYSQCRTTSSRATERNRIDYVSSAVPYLTTPPDLPRPEVVFIGRSNVGKSSLIKALFSLAPEVEVRVSKKPGHTKKMNFFKVGKHFTVVDMPGYGFRAPEDFVDMVETYLKERRNLKRTFLLVDSVVGIQKTDNIAIEMCEEFALPYVIVLTKIDKSSKGHLLKQVLHIQKFVNMKTQGCFPQLFPVSAVTFSGIHLLRCFIASVTGSLD

SEQ ID NO: 10487 - protein, 76 aa, Homo sapiens
GSVLKKTTGLVGLAVCNTPHEEPDVKKLEDQLQGGQLEEVILQAEHELNLARKMREWKLWEPLVEEPPADQWKWPI

SEQ ID NO: 10488 - protein, 168 aa, Homo sapiens
  misc_feature (1)...(168): Xaa = X or * as defined in Table 2
PCQSFQPSGFGKDRPTSLEQRSQRERQAAIFAVSQPSLVIPPGTGKSEVNADRSRPPAYCSNLGRYSGPGPPSLVIPPGTGKSEVNADRSGPPAYCSNHFPSALPXXRSSMRSLSLQQTSAWTCRHFHTSFEIQRGGSQILTLAFCAPAGPTPRGSHVLGLAPSEALT

SEQ ID NO: 10489 - protein, 168 aa, Homo sapiens
  misc_feature (1)...(168): Xaa = X or * as defined in Table 2
QSGDLGGRLSRSENCSQRVVRHRVVGAVMAGVLKKTTGLVGLAVCNTPHERLRILYTKILDVLEEIPKNAAYRKYTEQITNEKLAMVKAEPDVKKLEDQLQGGQLEEVILQAEHELNLAKKKXGEWKLWEPLVEEPPADQWKWANIIIKLTLVVFMGKLDVIKIFCYI

SEQ ID NO: 10490 - protein, 122 aa, Homo sapiens
  misc_feature (1)...(122): Xaa = X or * as defined in Table 2
YAGFSLSAQKCPGAMAEXSYAKSTKLVLKGTKTKSKKKKSKEKKRKREEDEETQFDIVGTIAIEMDEGTYIHALDNGLFTLGAPHKEGKMALLASNGCFIRCNEAGDIEAKSKTAGEEEMIT

SEQ ID NO: 10491 - protein, 157 aa, Homo sapiens; identical to SEQ ID NO: 10358
  misc_feature (1)...(157): Xaa = X or * as defined in Table 2

SEQ ID NO: 10492 - protein, 72 aa, Homo sapiens
TVTNFGEISGTIAIEMDEGTYIHALDNGLFTLGAPHKERIALKSGYGKYLGINSDELVGHSDAIGPREQWEH

SEQ ID NO: 10493 - protein, 183 aa, Homo sapiens
  misc_feature (1)...(183): Xaa = X or * as defined in Table 2
RPWKQDRRAGDPWPRTHEFRSSEASLQASACKKKKSKEKKRKREEDEETQFDMFGIWXTVTNFDEISGTIAIEMDEGTYIHALDNGLFTLGSSTQRRIALKSGYGKYLGINSDELVVGRSDAIGPREQWEPVFQNGACAAVFTVIGSEKQSECSLLRESRAKYHGCTHGQISSSLKQHPRWMY

SEQ ID NO: 10494 - protein, 202 aa, Homo sapiens
  misc_feature (1)...(202): Xaa = X or * as defined in Table 2
AGFSLSAQKCPGAMAEXSYAKSTKLVLKGTKTKSKKKKSKEKKRKREEDEETQFDIVGIWXTVTNFDEISGTIAIEMDEGTYIHALDDGLFTLGAPHKEGKMALLASNGCFIRCNEAGDIEAKSKTAGEEEMIKIRSCAERETKKKDDFLEEDKGNVKQCEINYVKKFQSFQEHKLKISKEDSKILKKAQKDGFLHETLLDR

SEQ ID NO: 10495 - protein, 314 aa, Homo sapiens
  DOMAIN (52)..(95): p53 tumor antigen proteins domain identified by eMATRIX, accession number BL00348F, p-value=8.475e-10, raw score of 23.19
AIQRLGEDGGGFYRDVGCQGVFISRPLLFLRAPVLPRLTYSSRTGLSLSAQKLPGAMAEYSYVKSTKLVLKGTKTKSKKKKSKDKKRKREEDEETQLDIVGIWWTVTNFGEISGTIAIEMDKGTYIHALDNGLFTLGAPHKESDEGPSPPEQFTAVKLSDSRIALKSGYGKYLGIIRDGLVVGRSDAIGPREQWEPVFKMGKMALSTSNSCFIRIHEAEDIEAKSKTAGEEEMIKIRSCAERETKKKDDIPEEDKGNVNKCEINYVKKFQSFQDHKLKISKEDSKILKKARKDGFLHETLLDRRAKLEADRYCK

SEQ ID NO: 10496 - protein, 180 aa, Homo sapiens
  DOMAIN (63)..(80): BETA HAEMOGLOBIN SIGNATURE domain identified by eMATRIX, accession number PR00814A, p-value=5.500e-22, raw score of 12.94
  DOMAIN (36)..(111): Globin domain identified by PFam, accession name globin, E- value=0.0091, PFam score of 14.1
PLKRSDGCNDGRPTRPPTRPDTTVFTSNLKQTRMVHLTPEEKSAVTALWGKVNVDEVGGKALGRLLVVYPWTQRFFESFGDLSTPDAVMGNPKVKAHGKKVLGAFSGGPGCTWDNLKGTFAHTEVSLHCDKLHRGSLKNFRLLGNVLGLCCLAHSLLGKEFQPHQLQACLIKKIGWLGVG

SEQ ID NO: 10497 - protein, 129 aa, Homo sapiens; identical to SEQ ID NO: 8803

SEQ ID NO: 10498 - protein, 47 aa, Homo sapiens
FPTPIPLFQELQAHVDQITEMAAVMRKPLKLTSNRVARNKNEYFNLK

SEQ ID NO: 10499 - protein, 150 aa, Homo sapiens
  misc_feature (1)...(150): Xaa = X or * as defined in Table 2
APACCPAAVSPFLCEPTLIHPPHPPDLKEDTGQKHRGAQSHPTLAGAGLAGRSSKQPSPSAISIWHSDGTSSCDRRQQCDRDLPSALLSPHLRCSQPATRQLESSXTPPGTADLFLASSGPNPRAFSNARSVRKCKATSEKSKPKSYQGS

SEQ ID NO: 10500 - protein, 153 aa, Homo sapiens
  DOMAIN (85)..(119): IMMUNOGLOBULIN V REGION domain identified by eMATRIX, accession number DM00031B, p-value=5.785e-09, raw score of 15.41
  DOMAIN (39)..(118): Immunoglobulin domain identified by PFam, accession name ig, E-value=5e-12, PFam score of 43.8
MKKNIAFLLASMFVFSIATNAYADIQMTQSPSSLSASVGDRVTITCRSSQSLVHGIGNTYLHWYQQKPGKAPKLLIYKVSNRFSGVPSRFSGSGSGTDFTLTISGLQPEDFATYYCQHYDSLPYTFGQGTKLEIKRTVAAPSVFIFPAHLMSS

SEQ ID NO: 10501 - protein, 54 aa, Homo sapiens
GDSPLNLSPFQYSNAFDGFAAYGGLNEKSFVDGLNFSLNNMQYSNQQFQPVMAN

SEQ ID NO: 10502 - protein, 380 aa, Homo sapiens
  DOMAIN (28)..(73): BTG1 family proteins domain identified by eMATRIX, accession number BL00960B, p-value=1.000e-40, raw score of 24.47
  DOMAIN (7)..(169): BTG1 family domain identified by PFam, accession name Anti_proliferat, E-value=2.4e-83, PFam score of 290.3
FCGVAAMQLEIQVALNFIISYLYNKLPRRRVNIFGEELERLLKKKYEGHWYPEKPYKGSGFRCIHIGEKVDPVIEQASKESGLDIDDVRGNLPQDLESFRIDPFEVSYQIGEKGPVKVLYVDDNNENGCELDKEIKNSFNPEAQVFMPISDPASSVSSSPSPPFGHSAAVSPTFMPRSTQPLTFTTATFAATKFGSTKMKNSGRGSSRFARTSPINLRLGMWNDLLEGRKAISSSMHSLYGLGLGSQQQPQQQQQPAQPPPPPPPPQQQQQQKTSALSPNAKEFIFPNMQGQGSSTNGMFPGDSPLNLSPLQYSNAFDVFATYGGLNEKSFVDGLNFSLNNMQYSNQQFQPCYGLTKKKKMYRTKLKCTGPRGIFFFSPP

SEQ ID NO: 10503 - protein, 399 aa, Homo sapiens
  DOMAIN (69)..(190): Glycine cleavage H-protein domain identified by PFam, accession name GCV_H, E-value=1.8e-07, PFam score of 13.7
MEYYATIKKNKIISFAAAWMQLDAITLSKLTQKRKTKYRMFLFVSEGRPPWAVGRESGWRPPVPFSSVLLLRDPGTGVLKDLNNQEVDGEHEDGALQANHHLLPDEFGALESVKAASELYSPLSGEVTEINEALAENPGLVNKSCYEDALTFYFDKYYKHRGSNPSNSLANFHFKALTIASKHHQIVKMDLRSRYLDSLKAIVFKQYNQIATVLRLLRVMEHVQTTLLLGKLPGALTACCHPLHLCVHKQAKCVTIAYSIQYSNMLYRFVAQEQRLYHTAKVKVTVLEDNDPFAQYHYLVTVYTGHRRGAATSSKVTVTLYGLDGEREPHHLADPDTPVFERGAVDAFLLSTLFPLGELRSSGCGMTTQGTAHRASTCDVLKVTQLASMEQGLCILEAK

SEQ ID NO: 10504 - protein, 184 aa, Homo sapiens
  DOMAIN (99)..(134): 2-oxo acid dehydrogenases acyltransferase component lipoyl bi domain identified by eMATRIX, accession number BL00189A, p-value= 4.414e-13, raw score of 19.58
  DOMAIN (50)..(184): Glycine cleavage H-protein domain identified by PFam, accession name GCV_H, E-value=3.4e-27, PFam score of 103.8
RRDPRTPANMALRVVRSVRALLCTLRAVPLPAAPCPPRPWQLGVGAVRTLRTGPALLSVRKFTEKQESGNNQEKSMNQLGSGNFAQEALGDVVYCSLPEVGTKLNKQDEFGALESVKAASELYSPLSGEVTEINEALAENPGTCKTNFCYEDGWLIKMTLSNPSELDELMSEEAYEKYIKSIEE

SEQ ID NO: 10505 - protein, 129 aa, Homo sapiens
  DOMAIN (73)..(125): Ubiquitin domain proteins domain identified by eMATRIX, accession number BL00299, p-value=8.861e-10, raw score of 28.84
  DOMAIN (64)..(100): Ubiquitin family domain identified by PFam, accession name ubiquitin, E-value=3.8e-07, PFam score of 26.6
VASEHSPKIGASQGLDYEPLLVVAKVWYLTRPTGTKAGSVFSQYLPFLEPGILGPASLPWLRQTLTGKEIEIDIEPTDKVERIKERVEEKEGIPPQQQRLHLQVAKQMNDEKTASWITKILRWVQSFQT

SEQ ID NO: 10506 - protein, 116 aa, Homo sapiens
  DOMAIN (26)..(63): S-100/ICaBP type calcium binding protein domain identified by eMATRIX, accession number BL00303A, p-value=1.000e-21, raw score of 21.77
  DOMAIN (27)..(70): S-100/ICaBP type calcium binding domain identified by PFam, accession name S_100, E-value=5.2e-18, PFam score of 73.3
GRDKEGEYPPAPSSGWGKSVGIMLTELEKALNSIIDVYHKYSLIKGNFHAVYRDDLKKLLETECPQYIRKKGADVWFKELDINTDGAVNFQEFLILVIKMGWQPTKKAMKKATKSS

SEQ ID NO: 10507 - protein, 47 aa, Homo sapiens
  DOMAIN (10)..(47): S-100/ICaBP type calcium binding protein domain identified by eMATRIX, accession number BL00303A, p-value=2.180e-12, raw score of 21.77
  DOMAIN (11)..(43): S-100/ICaBP type calcium binding domain identified by PFam, accession name S_100, E-value=0.011, PFam score of 15.4
GKSVGIMLTELEKALNSIIDVYHKYSLIKGNFHQLCSNIYFKKFYVF

SEQ ID NO: 10508 - protein, 232 aa, Homo sapiens
  DOMAIN (92)..(129): S-100/ICaBP type calcium binding protein domain identified by eMATRIX, accession number BL00303A, p-value=1.000e-21, raw score of 21.77
  DOMAIN (93)..(136): S-100/ICaBP type calcium binding domain identified by PFam, accession name S_100, E-value=1.1e-16, PFam score of 68.9
  misc_feature (1)...(232): Xaa = X or * as defined in Table 2
GKSTGPVCVHMSLCEWTLSLATRVSLSSHPSHQSHSHLLVWLFGESRPGQGLRLGHESSAYCPGQMQIPCHGIPQKVLFFRWGKSVGIMLTELEKALNSIIDVYHKYSLIKGNFHAVYRDDLKKLLETECPQYIRVRRGLGWRGLSAWSWGCPGPAVLPATLHRWLCLGSLXDLXTLASSSSILTKKGADVWFKELDINTDGAVNFQEFLILVIKMGWQPTKKAMKKATKSS

SEQ ID NO: 10509 - protein, 130 aa, Homo sapiens
  DOMAIN (47)..(84): S-100/ICaBP type calcium binding protein domain identified by eMATRIX, accession number BL00303B, p-value=8.714e-17, raw score of 26.15
RESGGKRLNIYHQTVYHKYSLIKGNFHAVYRDDLKKLLETECPQYIRKKGADVWFKELDINTDGAVNFQEFLILVIKMGWQPTKKAMKESHKGVSLSLLGPKGWALGGHVTCRIIKVINTSKKKKKVDAA

SEQ ID NO: 10510 - protein, 151 aa, Homo sapiens
MKLRTLAVSATALKVARLEFVPFDVRMCSEFLSSGVKLQTFAVSVTALNALRLELFVPPGGLMVSLASGVKLQIFTVSVTAHKSSVDPKTLGWSMGLGAVEQGAALIGEAWAAQEPMEGVGGSGMAGCRSRALPRGKAAKARREIERSAGH

SEQ ID NO: 10511 - protein, 92 aa, Homo sapiens
PLKRSDGCNDGRPTRPPTRPDTTVFTSNLKQTRMVHLTPEEKSAVTALWGKVNVDEVGGKALGRLLVVLPLGPPKGPLKSFGGICPNSLNAG

SEQ ID NO: 10512 - protein, 143 aa, Homo sapiens; identical to SEQ ID NO: 8541
  DOMAIN (21)..(43): Globins profile domain identified by eMATRIX, accession number BL01033A, p-value=2.929e-17, raw score of 16.94
  DOMAIN (10)..(143): Globin domain identified by PFam, accession name globin, E- value=4.3e-55, PFam score of 196.4

SEQ ID NO: 10513 - protein, 176 aa, Homo sapiens
  DOMAIN (49)..(66): BETA HAEMOGLOBIN SIGNATURE domain identified by eMATRIX, accession number PR00814A, p-value=1.000e-22, raw score of 12.94
FCPRGQEFGEGNKLLVPDAMGHFTEEDKATITSLWGKVNVEDAGGETLGRLLVVYPWTQRFFDSFGNLSSASAIMGNPKVKAHGKKVLTFLGRCQQSTLDDLKGHLLPKPEVNCTVDKPAMWDPENFKAPGEMLLVTRFGQSHFRQKNSPPGGCKASWAERWVTGVASALVPSRYH

SEQ ID NO: 10514 - protein, 123 aa, Homo sapiens
REPCVSRSSTCCPLPWMEPRAMCPPVGAMRGSRRDPASSSLSPDHLAQLQPGAGFLFCSAPALSGSFPPRPSPQGHLATAGSWLCPPVQAQPQAPALCGPRRGVAWVGIAWEDSGKSVGEVAS

SEQ ID NO: 10515 - protein, 454 aa, Homo sapiens
  DOMAIN (20)..(55): Prion protein domain identified by eMATRIX, accession number BL00291A, p-value=6.422e-10, raw score of 4.49
  DOMAIN (238)..(454): Josephin domain identified by PFam, accession name Josephin, E-value=4.2e-175, PFam score of 595.1
MEKSLLFPSLTTSAGNDRDSRSRSGGGESSGETGSESGPRAPGGPMTPPSPARGSLLSPALTCLPFPTPRRIQVQDVEKPMLGQQRQGLPAGRSPTVAAAILELETSGGDEEEPGRDHLRGVGTVLSEGDGGHACTPRLSGAKFYSEIIAIMVNLLQIVRDHWVHVLVPMGFVIGCYLDRKSDERLTAFRNKSMLFKRDGSSGSREFQLARQDACQWAYSWVGGSLRGKRTEQHPQWQEGSLCAQHCLNNLLQGEYFSPVELSSIAHQLDEEERMRMAEGGVTSEDYRTFLQWFNLNSLLTGPELISDTYLALFLAQLQQEGYSIFVVKGDLPDCEADQLLQMIRVQQMHRPKLIGEELAQLKEQRVHKTDLERVLEANDGSGMLDEDEEDLQRALALSRQEIDMEDEEADLRRAIQLSMQGSSRNISQDMTQTSGTNLTSEELRKRREAYFEK

SEQ ID NO: 10516 - protein, 85 aa, Homo sapiens
KLFQKKNKKSSCISDNFFFLLAIMVNLLQIVRDHWVHVLVPMGFVIGCYLDRKSDERLTAFRNKSMLFKSFPHRELQPSEEVTWK

SEQ ID NO: 10517 - protein, 53 aa, Homo sapiens
  DOMAIN (18)..(36): Eukaryotic molybdopterin oxidoreductases proteins domain identified by eMATRIX, accession number BL00559L, p-value=1.514e- 14, raw score of 13.60
KVPATTADMIREHLPAPGDDVLVLLCGPPPMVQLACHPNLDKLGYSQKMRFTY

SEQ ID NO: 10518 - protein, 274 aa, Homo sapiens
  DOMAIN (196)..(225): Eukaryotic molybdopterin oxidoreductases proteins domain identified by eMATRIX, accession number BL00559I, p-value=5.424e- 14, raw score of 13.63
  misc_feature (1)...(274): Xaa = X or * as defined in Table 2
DPHSVSSTGGPLPIWFWPLSSGPGAVAADPAPQGSGPTVDAGVPIPHIRARDSARLPLCPWHASALELGIATPGTVTTQAPGSYPAWRSRCLLYPQSPVLLASLGVGLVTLLGLAVGSYLVRRSRRPQVTLLDPSEKYLLRLLDKTVSWGRKGQGEGGDQSAPGMXGTAPTVVGMSKGRGSARRAWXNTCVLHPPTVSHNTKRFRFALPTAHHTLGLPVGKESVEWAPFPGYPQKVTPLLGSHETRCFNRFAPHTISPSPTWLCILQAVRCHWA

SEQ ID NO: 10519 - protein, 217 aa, Homo sapiens
  DOMAIN (106)..(150): Cytochrome b5 family heme-binding domain proteins. domain identified by eMATRIX, accession number BL00191K, p-value=7.000e- 25, raw score of 17.38
  DOMAIN (100)..(210): Oxidoreductase FAD/NAD-binding domain identified by PFam, accession name oxidored_fad, E-value=1.9e-14, PFam score of 61.4
  misc_feature (1)...(217): Xaa = X or * as defined in Table 2
NQPCLTLPTRKSECTDTVISWSLSFGFLFTRWVTGMAVLLRLSLRQAEYTHSQLLLPLDTXRLGNVVKFRGPSGLLSYTGKGHFNIQPNKKSPPEPRVAKKLGMIAGGTGITPMLQLIRAILKVPEDPTQCFLLFATQTEKDIILREDLEELQARYPNRFKLWFTLDHPPKGILPISGHPTIPSSSKSKPCPFVNSGFIEINLASHCQLGSLSAQTQ

SEQ ID NO: 10520 - protein, 332 aa, Homo sapiens
  DOMAIN (208)..(252): Cytochrome b5 family heme-binding domain proteins. domain identified by eMATRIX, accession number BL00191K, p-value=7.283e- 20, raw score of 17.38
  DOMAIN (51)..(178): FAD/NAD-binding Cytochrome reductase domain identified by PFam, accession name Cyt_reductase, E-value=1.3e-38, PFam score of 141.8
HACAHASAHASGRLVRWGRKRRSVMGIQTSPVLLASLGVGLVTLLGLAAGSYLVRRSRRPQVTLLDPNEKYLLRLLNKTTVSHNTKRFRFALPTAHHTLGLPVGKHIYLSTRIDGRVRIKPYTPVTSDEDQGYVDLVIKVYLKGVQPKFSEGGKMSQYLDSLKVGDVVEFRGPSGLLTYTGKGHFNIQPNKKSPPEPRVAKKLGMIAGGTGITPMLQLIRAILKVPEDPTQCFLLFANQTEKDIIFAGGLKRNLQARYPNRFKLWFTLDHPPKDWAYSKGFVTADMIREHLPAPGDDVLVLLCGPPPMVQLACHPNLGQTGVTSQKMAISPY

SEQ ID NO: 10521 - protein, 506 aa, Homo sapiens
  misc_feature (1)...(506): Xaa = X or * as defined in Table 2
MAPELSSKEQPGSEWKKACQMEGTVCAKAQRDLLDGFDQNADDDMDNEIQAEMVSDGDEELVGNWSKEPTTLGAATMGLGTEKQLGMGWAGRKGPIEDLEPLPQAACKLHAVAHTTWEEAVQCGSLPRRNSNLLLEQGVLEETRNLLQEHGGEIDLEKKRWLGTVAHTCNASTLGGRGVKLQTFTVSITAPKAARLELFVPPGGLVVLLASGVKLQIFAVSVTAHKSSVDPKTLGWSMGLGAVEQEVVLVGEAPAAQEPMEWVGGSGMGAAGPGALPRGKAAKARREIEHSAGLYKLLPHSEYSRPNRVPFNSQGSNPVRVSFVNLNDQSGNGDRLCFNVGRELYFYIYKGVRKTIPXGCRTEILISVLTEAADLSKPIDKRIYKGTQPTCHDFNHLTATAESVSLLVGFSAGQVQLIDPIKKETSKLFNEEAFEGRYATFFTIWYECSHGKLHISSALGLVFFGGDISYSLSSQPAPLEGASRDSGSRGHELWSESSRKRNNKRH

SEQ ID NO: 10522 - protein, 72 aa, Homo sapiens
RSPGRPPHDPPNAPVRRPASCHSAAESQHGGWKKSKISASRKLQLKTLLLQIAKQELEREAEERRGEKGRAL

SEQ ID NO: 10523 - protein, 136 aa, Homo sapiens
SSSPEETDGPWDPEGHPGGPGTEPPNAPVLALPPAIPGLRLSMADGSSDAVREPRPAPTPIRRRSSNYRAYATERRGEKGRALSTRCQPLELAGLGFAELQDLCRQLHARVDKVDEERYDIEAKVTKNITEIADLT

SEQ ID NO: 10524 - protein, 162 aa, Homo sapiens
  DOMAIN (100)..(135): Troponin domain identified by eMATRIX, accession number PF00992A, p-value=1.931e-26, raw score of 16.67
  misc_feature (1)...(162): Xaa = X or * as defined in Table 2
SSPEETVGPWDPEGHPGGPLTDPPNAPVLALPPAIPGLSLIMADGSSDAVRAAGXGVAGTPRARAREPRPAPAPIRRRSSNYRAYATEPHAKKKSKISASRKLQLKTLLLQIAKQELEREAEERRGEKGRALSTRCQPLELAGLGFAELQDLCRQLHARVDK

SEQ ID NO: 10525 - protein, 197 aa, Homo sapiens
  DOMAIN (65)..(100): Troponin domain identified by eMATRIX, accession number PF00992A, p-value=1.931e-26, raw score of 16.67
  DOMAIN (114)..(197): RNase H domain identified by PFam, accession name rnaseH, E- value=0.035, PFam score of -25.0
TLQTPLSSSLPPAIPGLSLSMADGSSDAAREPRPAPAPIRRRSSNYRAYATEPHAKKKSKISASRKLQLKTLLLQIAKQELEREAEERRGEKGRALSTRCQPLELAGLGFAELQPDHTWFIDGSSTRPNRHTPAKAGYAIVSSTSIIEDTALPPSTTSQQAELIALTQALTLAKGLRVNIYTDSKYAFHILPHHAVI

SEQ ID NO: 10526 - protein, 229 aa, Homo sapiens
  DOMAIN (159)..(194): Troponin domain identified by eMATRIX, accession number PF00992B, p-value=6.455e-23, raw score of 26.31
  DOMAIN (50)..(191): Troponin domain identified by PFam, accession name Troponin, E-value=1.1e-30, PFam score of 115.4
VSAWRNGSSDAAREPRPAPAPIRRRSSNYRAYATEPHAKKKSKISASRKLQLKTLLLQIAKQELEREAEERRGREGARSLAPRCQPLELAGLGFADLPGLCCRQFHARVDKVDEERYDIEAKVSKNITEIANLTQKIFDLRSKFKRPTLRRVRISADAMMQALLGARAKESLDLRAHLKQVKKEDPEKENREVGDWRKNIDALSGMEGRMKKWRELSLPAYCPCPEEGH

SEQ ID NO: 10527 - protein, 960 aa, Homo sapiens
  DOMAIN (426)..(474): Sodium:galactoside symporter family proteins domain identified by eMATRIX, accession number BL00872B, p-value=1.000e- 40, raw score of 26.61
  DOMAIN (265)..(535): Sodium:galactoside symporter family domain identified by PFam, accession name Na_Galacto_symp, E-value=5e-146, PFam score of 498.5
MSKIKTLLQYSPSSTNSQPWHFIVGSKAFVESVRAEHPDARHHCVAWVAGAPDDSQQLGFSDDGEPAGTAGKPMLAQLMGSGVGEITAVVVRYYGGILLGTGGLVKAYGGGVNQALRQLTTQRKTPLTEYTLQCEYHQLTGIEALLGQCDGKIINSDYQAFVLLRVALPAAKVAEFSAKLADFSRGSLHAPARLASISAGCRFPTQDRSKSMMNCSYGAMVPAITKNPNERASLAAWRQGGATLGLLLCTVGFVPVMNLIEGNQQLGYIFAATLFSLFGLLFMWICYSGVKERYVETQPANPAQKPGLLQSFRAIAGNRPLFILCIANLCTLGAFNLAIQVYYTQYVLNDPILLSYMGFFSMGCICIGVFLMPASVRRFGKKKVYIGGLLIWVLGDLLNYFFGGGSVSFVAFSCLAFFGSAFVNSLNWALVSDTVEYGEWRTGVRSEGTVYTGFTFFRKVSQALAGFFPGWMLTQIGYVPNVAQADHTIEGLRQLIFIYPSALAVVTIVAMGCFYSLNEKMYVRIVEEIEARKRTAFLPAPLAFNVNIYAEFASGFFQIFRSHIGVSNTRRTGRYADDSWRVGKRGRRLRASLVIQRREQLIRRRRRLYTRPNLIIRKARGGSCACAGSCKCKKCKCTSCKKSECGAISRNLGLWLRLLDSIETEKGKRSLFYIFRVTPVSCEQKSRYALAIRANSREETMDNDKIDQHSDEIEVESEEKERGKKIEIDEDRLPSRAMAIHEHIRQDGEKELDARIALGVENIIESCTVVSRQGKDADIMIIGGIPDKLKDDKQIDLLVQATESWVKTPMRQTPFPGIVPDESDRAAETRSTLTSSGAMAAVIGFQSPYNDQRSVIALLADSPRGYEMLNDAVNDSGKRATMFGSVAVIRESGINSLRVGDVYYVGHLPWFERVWYALANHPILLAVLAAISVILLAWVLWRLLRIISRRRLNPDNEIYE

SEQ ID NO: 10528 - protein, 1609 aa, Homo sapiens
  DOMAIN (1003)..(1035): Alpha-2-macroglobulin family thiolester region proteins domain identified by eMATRIX, accession number BL00477G, p-value= 6.040e-33, raw score of 19.43
  DOMAIN (1)..(626): Alpha-2-macroglobulin family N-terminal regi domain identified by PFam, accession name A2M_N, E-value=0, PFam score of 1168.7
MGPTSGPSLLLLLLTHLPLALGSPMYSIITPNILRLESEETMVLEAHDAQGDVPVTVTVHDFPGKKLVLSSEKTVLTPATNHMGNVTFTIPANREFKSEKGRNKFVTVQATFGTQVVEKVVLVSLQSGYLFIQTDKTIYTPGSTVLYRIFTVNHKLLPVGRTVMVNIENPEGIPVKQDSLSSQNQLGVLPLSWDIPELVNMGQWKIRAYYENSPQQVFSTEFEVKEYVLPSFEVIVEPTEKFYYIYNEKGLEVTITARFLYGKKVEGTAFVIFGIQDGEQRISLPESLKRIPIEDGSGEVVLSRKVLLDGVQNLRAEDLVGKSLYVSATVILHSGSDMVQAERSGIPIVTSPYQIHFTKTPKYFKPGMPFDLMVFVTNPDGSPAYRVPVAVQGEDTVQSLTQGDGVAKLSINTHPSQKPLSITVRTKKQELSEAEQATRTMQALPYSTVGNSNNYLHLSVLRTELRPGETLNVNFLLRMDRAHEAKIRYYTYLIMNKGRLLKAGRQVREPGQDLVVLPLSITTDFIPSFRLVAYYTLIGASGQREVVADSVWVDVKDSCVGSLVVKSGQSEDRQPVPGQQMTLKIEGDHGARVVLVAVDKGVFVLNKKNKLTQSKIWDVVEKADIGCTPGSGKDYAGVFSDAGLTFTSSSGQQTAQRAELQCPQPAARRRRSVQLTEKRMDKVGKYPKELRKCCEDGMRENPMRFSCQRRTRFISLGEACKKVFLDCCNYITELRRQHARASHLGLARSNLDEDIIAEENIVSRSEFPESWLWNVEDLKEPPKNGISTKLMNIFLKDSITTWEILAVSMSDKKGICVADPFEVTVMQDFFIDLRLPYSVVRNEQVEIRAVLYNYRQNQELKVRVELLHNPAFCSLATTKRRHQQTVTIPPKSSLSVPYVIVPLKTGLQEVEVKAAVYHHFISDGVRKSLKVVPEGIRMNKTVAVRTLDPERLGREGVQKEDIPPADLSDQVPDTESETRILLQGTPVAQMTEDAVDAERLKHLIVTPSGCGEQNMIGMTPTVIAVHYLDETEQWEKFGLEKRQGALELIKKGYTQQLAFRQPSSAFAAFVKRAPSTWLTAYVVKVFSLAVNLIAIDSQVLCGAVKWLILEKQKPDGVFQEDAPVIHQEMIGGLRNNNEKDMALTAFVLISLQEAKDICEEQVNSLPGSITKAGDFLEANYMNLQRSYTVAIAGYALAQMGRLKGPLLNKFLTTAKDKNRWEDPGKQLYNVEATSYALLALLQLKDFDFVPPVVRWLNEQRYYGGGYGSTQATFMVFQALAQYQKDAPDHQELNLDVSLQLPSRSSKITHRIHWESASLLRSEETKENEGFTVTAEGKGQGTLSVVTMYHAKAKDQLTCNKFDLKAAGPMVLTDTSPSMSLDKAFSDRNTLIIYLDKVSHSEDDCLAFKVHQYFNVELIQPGAVKVYAYYNLEESCTRFYHPEKEDGKLNKLCRDELCRCAEENCFIQKSDDKVTLEERLDKACEPGVDYVYKNRLVKVQLSNDFDEYIMAIEQTIKSGSDEVQVGQQRTFISPIKCREALKLEEKKHYLMWGLSSDFWGEKPNLSYIIGKDTWVEHWPEEDECQDEENQKQCQDLGAFTESMVVFGCPN

SEQ ID NO: 10529 - protein, 185 aa, Homo sapiens
  DOMAIN (125)..(171): Vertebrate metallothioneins proteins domain identified by eMATRIX, accession number BL00203, p-value=5.451e-11, raw score of 13.94
  DOMAIN (1)..(31): Alpha-2-macroglobulin family domain identified by PFam, accession name A2M, E-value=0.00018, PFam score of 15.7
EGKGQGTLSVVTMYHAKAKDQLTCNKFDLCLPGSRQKVEVFLGPCLQPGTFLWSRNRRVLGFPSMNGEDMGLLFLCSEWERSSEGWLCNREGGSGHSIEPHCCTFLHLTHRSLAFSLLAGVSCTCASSCKCKECKCTSCKKSECGAISRNLGLWLKVGREPKAVPEVRASGEPAFLCPCRLSLPV

SEQ ID NO: 10530 - protein, 525 aa, Homo sapiens
  DOMAIN (285)..(491): Sterol desaturase domain identified by PFam, accession name Sterol_desat, E-value=1.5e-12, PFam score of 55.2
SNQPLRREAFPETPKGLRQGIPGEPENGDRSHFFSFDVTAVMILYKESQALTGNLPGPQLPRRLRAAGRGGHPSVPAPSRRGALSRFPASGRSAVPTIGWLCRSHYPHSIRGANGWDRQELVRASHTMSATAQTNHRAEKAGRELSQANNDRTGRLAHPAPPPSQARQVPRLEHLASPRCRWPAVISRPFRSWHCILEIRFRKGKLGGRASPENEGAGEIRVKVPKDRDWLTAKLQGDLLTVSQTAKLEDMVLQTAKSTQDFLTPTARSYSPTTKLKGKVNTKSPTLLTPTARGRHYLLGAPIASWRCHTSTIRYHTVVVMSMTLTESEHQAGSVDMSANDYAHYSGASGDNEMCVVIACPTPLFLSPRAWKPCDAGSKVKNWGIENGNLVHTVLSSTQHGDPEHVHAPFGMEAEYAHPLETLILGTGFFIGIVLLCDHVILLWAWVTIRLLETIDVHSGYDIPLNPLNLIPFYAGSRHHDFHHMNFIGNYGFQHFTRWDWNFLGTDSQYNAYNEKRKKFEKKTE

SEQ ID NO: 10531 - protein, 289 aa, Homo sapiens
  DOMAIN (27)..(133): Integral membrane protein DUF6 domain identified by PFam, accession name DUF6, E-value=0.092, PFam score of 8.3
GRVGEMSQGRGKYDFYIGLGLAMSSSIFIGGSFILKKKGLLRLARKGSMRAGQGGHAYLKEWLWRAGLLSMGAGEVANFAAYAVAPATLVTPLGALSVLVRAILSSYFLNERLNLHGKIGCLLSILGSIVMVIHAPKEEEIETLNEMSHKLGDPGFVVFATLVVIVALILIFVVGPRHGQTNILVYITICSVIGAFSVSCVKGLGIAIKELFAGKPVLGIPWAWILLLSLIVCVSTQINYLNRPWDIFNTSIVTPIYYVFFTTSVLTCSAILFKGVGKDMPVGRCPLVL

SEQ ID NO: 10532 - protein, 382 aa, Homo sapiens
  misc_feature (1)...(382): Xaa = X or * as defined in Table 2
DRVSLLLPRLECNGAILAHCNLCLSGSSDSPASASQVTGITGKCHHTQLIFVFLVEMGFHHIAQAGLELLTSDSPTLASQSAGITGVNHHAWLFFFCSRDTVSLCYPGWSRVAXSRITATSAPGLKXFACFSLPSSRDYRHVPPHPGNFCIFGRDEVSPCWPGWFXTPDLRYPPASASQSAEIIGVSHHTWPQEVFLFLNLFIYLRWSLDSVAQARVQRRDLGSLQAPPPRFKPFSCLSLPSSWDYRRPPPHPANFFVFLVETGFTVLARRVLISXPRDLPASASQSAGITGVSHHTRLIFNFFETGTHSVTWAAVQWYTIGSLQPRTPELKXSSHLILTSNWDYRCTPPCPPNLFIYLFIYFHRDEGSLCCPGWSXTPELK

SEQ ID NO: 10533 - protein, 91 aa, Homo sapiens
  DOMAIN (51)..(71): VASOPRESSIN V2 RECEPTOR SIGNATURE domain identified by eMATRIX, accession number PR00898F, p-value=2.800e-09, raw score of 9.10
IQRFSTSPPDSGAQLASPSGSRTRAAGGAACQSWCRAPALLSPWVVDGTGRRGAGGGGRRGGSGRTGAHGVGGRLRHGGLQVPSPAPREGS

SEQ ID NO: 10534 - protein, 122 aa, Homo sapiens; identical to SEQ ID NO: 8986

SEQ ID NO: 10535 - protein, 258 aa, Homo sapiens
PGSTISWRPGLARSLSPPDGRRPRRGLGPGPSPASMAGRTVRAETRSRAKDDIKKVMATIEKVRRWEKRWVTVAATPFRILNWVAVVDPQEEERRRAGGGAERSRGRERRGRGASPDGGGPLFILLDLNDENSNQRFPLRKGSLQRGTEPSPGGTPKPNRPCVTLPDPPEGGPCTRAQPPTRLGQEERSPGGITVGSTDEPPMLTKEEPVPELLEAEAPEAYPVFEPVPPVPEAAQGDTEDFGSAPPLKRICPNAPDP

SEQ ID NO: 10536 - protein, 57 aa, Homo sapiens
DCVRKQLKKERPIILDPADPTLNVAEGYWLGLGIYGIQDSDTLILSKKKGEALFPAS

SEQ ID NO: 10537 - protein, 611 aa, Homo sapiens
  DOMAIN (215)..(258): 'Homeobox' domain proteins domain identified by eMATRIX, accession number BL00027, p-value=6.786e-12, raw score of 26.43
MVSKLSQLQTELLAALLESGLSKEALIQALGEPGPYLLAGEGPLDKGESCGGGRGELAELPNGLGETRGSEDETDDDGEDFTPPILKELENLSPEEAAHQKAVVETLLQEDPWRVAKMVKSYLQQHNIPQREVVDTTGLNQSHLSQHLNKGTPMKTQKRAALYTWYVRKQREVAQQFTHAGQGGLIEEPTGDELPTKKGRRNRFKWGPASQQILFQAYERQKNPSKEEREAQGLGSNLVTEVRVYNWFANRRKEEAFRHKLAMDTYSGPPPGPGPGPALPAHSSPGLPPPALSPSKVHGVRYGQPATSETAEVPSSSGGPLVTVSTPLHQVSPTGLEPSHSLLSTEAKLVSAAGGPLPPVSTLTALHSLEQTSPGLNQQPQNLIMASLPGVMTIGPGEPASLGPTFTNTGASTLVIGLASTQAQSVPVINSMGSSLTTLQPVQFSQPLHPSYQQPLMPPVQSHVTQNPFMATMAQLQSPHALYSHKPEVAQYTHTGLLPQTMLITDTTNLSALASLTPTKQVFTSDTEASSESGLHTPASQATTLHVPSQDPAGIQHLQPAHRLSASPTVSSSSLVLYQSSDSSNGQSHLLPSNHSVIETFISTQMASSSQ

SEQ ID NO: 10538 - protein, 199 aa, Homo sapiens
RGGRPAWPCGSRAMVSKLSQLQTELLAALLESGLSKEALIQALGEPGPYLLAGEGPLDKGESCGGGRGELAELPNGLGETRGSEDETDDDGEDFTPPILKELENLSPEEAAHQKAVVETLLQEDPWRVAKMVKSYLQQHNIPQREVVDTTGLNQSHLSQHHQQGHSHEDAEAGRPVHLVRPQAARGGAAVHPCRAGRAD

SEQ ID NO: 10539 - protein, 514 aa, Homo sapiens
  DOMAIN (235)..(278): 'Homeobox' domain proteins domain identified by eMATRIX, accession number BL00027, p-value=4.375e-15, raw score of 26.43
  misc_feature (1)...(514): Xaa = X or * as defined in Table 2
MVSKLSQLQTELLAALLESGLSKEALIQALGEPGPYLLAGEGPLDKGESCGGGRGELAELPNGLGETRGSEDETDDDGEDFTPPILKELENLSPEEAAHQKAVVETLLQEDPWRVAKMVKSYLQQHNIPQREVVDTTGLNQSHLSQHLNKGTPMKTQKRAALYTWYVRKQREVAQQFTHAGQGGLIEEPTGDELPTKKGRRNRFKWGPASQQILFQAYERQKNPSKEERETLVEECNRAECIQRGVSPSQAQGLGSNLVTEVRVYNWFANRRKEEAFRHKLAMDTKVHGVRYGQPATSETAEVPSSSGGPLVTVSTPLHQVSPTGLEPSHSLLSTEAKLVSAAGGPLPPVSTLTALHSLEQTSPGLNQQPQNLIMASLPGVMTIGPGEPASLGPTFTNTGASTLVIVPTLDQSLCYISDTWVNQTDQNLSNSSREAGTKHNTSILWYLRRPGLHAGTECAGHQQHGQQPDHLQPVQFSQPLHPSYQQPLMPPVQSHVTQSPFMATMAQLQSPHX

SEQ ID NO: 10540 - protein, 698 aa, Homo sapiens
  DOMAIN (386)..(410): 2'-5'-oligoadenylate synthetases proteins domain identified by eMATRIX, accession number BL00832D, p-value=6.230e-17, raw score of 21.81
MMLKGKAHCSILDFGFLDLQCSTNSAAEFIRSWEDPWRVAKMVKSYLQQHNIPQREVVDTTGLNQSHLSQHLNKGTPMKSQKRAALYTWYVRKQREVAQPHIPYPIPENSTGTEWLIELTWLDPTHAKNDQEHRTDSPVNYGKKKGKENKNLKPPPEVYVSLIKACGGPGNFCPSFSELQRNFVKHRPTKLKSLLRLVKHWYQQWLQPHREWKEEVLDAVRTVEEFLRQEHFQGKRGLDQDVRVLKVVKVGSFGNGTVLRSTREVELVAFLSCFHSFQEAAKHHKDVLRLIWKTMWQSQDLLDLGLEDLRMEQRVPDALVFTIQTRGTAEPITVTIVPAYRALGPSLPNSQPPPEVYVSLIKACGGPGNFCPSFSELQRNFVKHRPTKLKSLLRLVKHWYQQYVKARSPRANLPPLYALELLTIYAWEMGTEEDENFMLDEGFTTVMDLLLEYEVICIYWTKYYTLHNAIIEDCVRKQLKKERPIILDPADPTLNVAEGYRWDIVAQRASQCLKQDCCYDNRENPISSWNVKRARDIHLTVEQRGYPDFNLIVNPYEPIRKVKEKIRRTRGYSGLQRLSFQVPGSERQLLSSRCSLAKYGIFSHTHIYLLETIPSEIQVFVKNPDGGSYAYAINPNSFILGLKQQIEDHQGLPKKQQQLEFQGQVLQGLVGVWGFYGIQDSDTLILSKKKGEALFPAS

SEQ ID NO: 10541 - protein, 111 aa, Homo sapiens
  misc_feature (1)...(111): Xaa = X or * as defined in Table 2
ALLSWEMSAACWEEPWGLPGGFAKRVLVTGGAGFIRXWRRXPSSGSPETPTFSRSSACPSASHMIVSLVEDYPNYMIINLDKLDYCASLKNLETISNKQNYKFIQGDICDS

SEQ ID NO: 10542 - protein, 359 aa, Homo sapiens
  DOMAIN (27)..(348): NAD dependent epimerase/dehydratase family domain identified by PFam, accession name Epimerase, E-value=5.6e-82, PFam score of 285.8
ALLSWEMSAACWEEPWGLPGGFAKRVLVTGGAGFISASHMIVSLVEDYPNYMIINLDKLDYCASLKNLETISNKQNYKFIQGDICDSHFVKLLFETEKIDIVLHFAAQTHVDLSFRTCPWSFTHVNVYMGTHVLVSAAHEARVEKFIYVSTDEVYGGSLDKEFDESSPKQPTNPYASSKAAAECFVQSYWEQYKFPVVITRSSNVYGPHQYPEKVIPKFISLLQHNRKCCIHGSGLQTRNFLYATDVVEAFLTVLKKGKPGEIYNIGTNFEMSVVQLAKELIQLIKETNSESEMENWVDYVNDRPTNDMRYPMKSEKIHGLRWRPKVPWKEGIKKTIEWYRENFHNWKNVEKALEPFPV

SEQ ID NO: 10543 - protein, 82 aa, Homo sapiens
IVMCHCLELVIGEPCHEICGSVCVCVYAAVCVLCVCVHTCICFGACVCVCVCRRVCPVCLCTYLYLLWGLCVVCYQRVNFWK

SEQ ID NO: 10544 - protein, 170 aa, Homo sapiens
  misc_feature (1)...(170): Xaa = X or * as defined in Table 2
QKIINKVVPITGRQCCFVRLSPLESLKFQSKEEIRNTSHRANVTKRNSANRKTDAILATPGPPPAQPHGAPGGYAPRLPQHPAPGCFPKCGNPAPRPWYGPFSGPLLRKEQKRNPRKGTGXMQGVSPVPFPPTXNAGPLPGGSLGPPISGHHFLVSHTWPPPPRSPTAPP

SEQ ID NO: 10545 - protein, 451 aa, Homo sapiens
  DOMAIN (387)..(400): JUN TRANSCRIPTION FACTOR SIGNATURE domain identified by eMATRIX, accession number PR00043C, p-value=2.364e-15, raw score of 10.55
GQPRSQQGAGSWGKRRQESYRAREGDGGSGSLTGLLRTAAGWLLPARASPRERATRHPVRSPQRRARRSLQRGPERPRRDPPQTAWAARMCTKMEQPFYHDDSYTATGYGRAPGGLSLHDYKLLKPSLAVNLADPYRSLKAPGARGPGPEGGGGGSYFSCQGSDTGPSLKLASSELERLIVPNSKTAITTTPTPPGQYFYPRGGGSGGGAGGAWGGVTEEQEGFADGFVKALDDLHKMNHVTPPNVSLGATGGPPHGPGGIRSASPEPPPVYTNLSSYSPASASSGGAGAAVGTGSSYPTTTISYLPHAPPFAGGHPAQLGLGRGASTFKEEPQTVPEARSRDATPPVSPINMERPRAPSKLEPSGLRNRLAGHQSAGKRKLKRFARLEDKVKTLKAENAGPVEVPPGLPPGSRLAQAQTRKVIDPRVSNGLSSLLFGVRGHAFLNVPCPL

SEQ ID NO: 10546 - protein, 1194 aa, Homo sapiens
IRRPLDQRGGIPLRKKPLEDLVCKLADISINYVNERKSEQHLRFLSTLLDSFSSSRVFKMLLGDEKQSIVQAKPLEIAKLVQKNPAVQFLYQKLIGWLNEDQRKDFGFLVDILYSALRCCDNDMERKKVLDDLTKVDLKWNSLLKIIEKACPSSDKHALVTPWLKGDILGEKLVNLADCLCNEDLESRVSSESHFSERWTLLSLVLSQHVKNDYLIGDVYVERIIVRLHETLFKTKKLSEAESSDSSVSFICDVAYNYFSSAKGCLLMPSSEDLLLTLFQLCAQSKEKTHLPDFLICKLKNTWLSGVNLLVHQTDSSYKESTFLHLSALWLKNQVQASSLDINSLQVLLSAVDDLLNTLLESEDSYLMGVYIGSVMPNDSEWEKMRQSLPMQWLHRPLLEGRLSLNYECFKTDFKEQDIKTLPSHLCTSALLSKMVLIALRKETVLENNELEKIIAELLYSLQWCEELDNPPIFLIGFCEILQKMNITYDNLRVLGNTSGLLQLLFNRSREHGTLWSLIIAKLILSRSISSDEVKPHYKRKESFFPLTEGNLHTIQSLCPFLSKEEKKEFSAQCIPALLGWTKKDLCSTNGGFGHLAIFNSCLQTKSIDDGELLHGILKIIISWKKEHEDIFLFSCNLSEASPEVLGVNIEIIRFLSLFLKYCSSPLAESEWDFIMCSMLAWLETTSENQALYSIPLVQLFACVSCDLACDLSAFFDSTTLDTIGNLPVNLISEWKEFFSQGIHSLLLPILVTVTGENKDVSETSFQNAMLKPMCETLTYISKEQLLSHKLPARLVADQKTNLPEYLQTLLNTLAPLLLFRARPVQIAVYHMLYKLMPELPQYDQDNLKSYGDEEEEPALSPPAALMSLLSIQEDLLENVLGCIPVGQIVTIKPLSEDFCYVLGYLLTWKLILTFFKAASSQLRALYSMYLRKTKSLNKLLYHLFRLMPENPTYAETAVEVPNKDPKTFFTEELQLSIRETTMLPYHIPHLACSVYHMTLKDLPAMVRLWWNSSEKRVFNIVDRFTSKYVSSVLSFQEISSVQTSTQLFNGMTVKARATTREVMATYTIEDIVIELIIQLPSNYPLGSIIVESGKRVGVAVQQWRNWMLQLSTYLTHQNGSIMEGLALWKNNVDKRFEGVEDCMICFPVIHGFNYSLPKKACRTCQKKFHSACLYKWFTSSNKSTCPLCRETFF

SEQ ID NO: 10547 - protein, 239 aa, Homo sapiens
  DOMAIN (182)..(195): EF-hand calcium-binding domain proteins domain identified by eMATRIX, accession number BL00018, p-value=8.826e-09, raw score of 7.41
  misc_feature (1)...(239): Xaa = X or * as defined in Table 2
PVFKTPLPSHRRAHAAALDLLGASSSDPHADSGTGNWAEVDPGSAQHLPRPSSQLPHFLLSGGGPGQCRRGQRGELLPSSGGTATPCAPRGLGWGLRSCALRAAAAPPTAPQTLLRRAPRPARPRAGPGLAPQPSISRDFLGQAACASGTMLRWLRDFVLPTAACQDAEQPTRYETLFQALDRNGDGVVDIGELQEGLRNLGIPLGQDAEEVGRRRGAAXAXGGLRALGTLRGPRRAAA

SEQ ID NO: 10548 - protein, 470 aa, Homo sapiens
  DOMAIN (385)..(408): MITOCHONDRIAL CARRIER PROTEIN SIGNATURE domain identified by eMATRIX, accession number PR00926F, p-value=7.750e-19, raw score of 17.75
  DOMAIN (222)..(466): Mitochondrial carrier proteins domain identified by PFam, accession name mito_carr, E-value=7.2e-71, PFam score of 245.8
RDARRYSGTTPHPSISRDLLGQAVCASGTMLRWLRDFVLPTAACQDAEQPTRYETLFQALDRNGDGVVDIGELQEGLKNLGIPLGQDAEEKIFTTGDVNKDGKLDFEEFMKHLKDHEKKMKLAFKSLDKNNDGKIEASEIVQPLQTLGLTISEQQAELILQSIDVDGTMTVDWNEWRDYFLFNPVTDIEEIIRFWKHSTGIDIGDSLTIPDEFTEDEKKSGQWWRQLLAGGIAGAVSRTSTAPLDRLKIMMQVHGSKSDKMNIFGGFRQMVKEGGIRSLWRGNGTNVIKIAPETAVKFWAYEQVMKTRLAVGKTGQYSGIYDCAKKILKHEGLGAFYKGYVPNLLGIIPYAGIDLAVYELLKSYWLDNFAKDSVNPGVMVLLGCGALSSTCGQLASYPLALVRTRMQAQAMLEGSPQLNMVGLFRRIISKEGIPGLYRGITPNFMKGLPAVGISYVVYENMKQTLGVTQK

SEQ ID NO: 10549 - protein, 74 aa, Homo sapiens
AKRLLFLLLTIVFCQILMPQEGVPAPLPPEDAPNAASLAPTPVSPVLEPFNLTSEPSDYALDLSTFLQQHPAAF

SEQ ID NO: 10550 - protein, 171 aa, Homo sapiens
SRVDPRVRHSARLTMCHSRSCHPTMTILQAPTPAPSTIPGPRRGSGPEIFTFDPLPEPAADPAGRPSASRGHRKRSRRVLYPRVVRRQLPVEEPNPAKRLLFLLLTIVFCQILMAEEGVPAPLPPEDAPNAASLAPTPVSPVLEPFNLTSEPLDYASWNLSTFLQQHPAAF

SEQ ID NO: 10551 - protein, 241 aa, Homo sapiens
  DOMAIN (184)..(198): Shiga/ricin ribosomal inactivating toxins proteins signatu domain identified by eMATRIX, accession number BL00275A, p-value= 8.548e-09, raw score of 12.16
TFPSGAKPPLAASHHHRHLRDASRLWRGRSGGPSVTRRPTFLPSYPPAPAHAPASAPGPSDSDCSPPFSRRRSPTRTDCFVCRPVCPFPFIVPPGRAPSRMAEVLLLLLLLSLPSAAAKIQGYPSCPGPQLSRDILSSGDGWWAGLSGHHRVCGGPGVQEPQTTVVHNATDGIKYIHHRLIHLTPADYDDFVNAIRSARSAFCLTPMGMMQFNDILQNLKRSKQTKELWQRVSLEMATFSP

SEQ ID NO: 10552 - protein, 133 aa, Homo sapiens
KGLSLSKKAGENHYFYLPHSFPEKAPPGAIGHLSPRGTIEEALDLFSARIVAEFIVLPASHHPRHLRDASRLWRGRSGGPSVTRRPTFLPSYPPAPAHAPASAPGPSDSDCSPPFSRRRSPTRLARMRGLLGF

SEQ ID NO: 10553 - protein, 93 aa, Homo sapiens
  misc_feature (1)...(93): Xaa = X or * as defined in Table 2
SHLLGLHEPSRHNRASPGSLFCTHRRGIHSASSKPSSPTSPXCKSPRPSPGAAPRRGXLEXAGLLGFSTGFRGFPNRARRPRRLGVAIAHQAP

SEQ ID NO: 10554 - protein, 310 aa, Homo sapiens
MTLEELVACDNAAQKMQTVTAAVEELLVAAQRQDRLTVGVYESAKLMNVDPDSVVLCLLAIDEEEEDDIALQIHFTLIQSFCCDNDINIVRVSGMQRLAQLLGEPAETQGTTEARDLHCLLVTNPHTDAWKSHGLVEVASYCEESRGNNHTTPPKQPNPRGPSGAESLETEEEEEEEKGSERPPPGRRSRSWRPPIRWRRGDPGQQETGPPKLRPWDGAEAGVAGHAAAFPITEGPDCPLGGGQLRDRFITKPGRRATTVTGCAGANPKLWAHMEAFQREGVLAAAPDRLGGHRSPRSGSVKGAPGTTQR

SEQ ID NO: 10555 - protein, 259 aa, Homo sapiens
  misc_feature (1)...(259): Xaa = X or * as defined in Table 2
SFYETKKLLISGSETLDSKDQYRINKYNHYFQTLHYTIHLKFSSGLSSATQXKLSWSKGNGXGERPVSPPPLMAPSGQLLAIHVWSEVKSVSSCFLSCQQGHVLTSPGSSFPQCQPAQCYLIPCSSEKYTNGWPGPIPPSLGIQSSSSPGSXSGPISSSKYSGDAQVCFSSPNLFPSFRPVTGCIQSPPNISPGAEKGCGLQPIPVHSFLTPSTFSPVSPIXRSHRSTHPETHSMSHSSQSSPQAPSALPPSISLPLSP

SEQ ID NO: 10556 - protein, 39 aa, Homo sapiens
TPLPPSTTPPKQPNPRGPSGAESLETEEEEEEEKGSERT

SEQ ID NO: 10557 - protein, 146 aa, Homo sapiens
TPLPPSTTPPKQPNPRGPSGAESLETEEEEEEEKGSERPPPGRRSRSLRPPIRWRRGDPGQQETGPPKLRPWDGAEAGVAGHAAAFPHITEGPRLVPLGGGVRLTPSPTLLRTGAGLLHYERLWLNLVGPCLHPRQDHTLGLGSWG

SEQ ID NO: 10558 - protein, 103 aa, Homo sapiens
  DOMAIN (54)..(68): VERTEBRATE METALLOTHIONEIN SIGNATURE domain identified by eMATRIX, accession number PR00860B, p-value=5.164e-09, raw score of 7.04
  DOMAIN (24)..(91): Metallothionein domain identified by PFam, accession name metalthio, E-value=0.011, PFam score of 21.3
ARDVHPLPLPFSLGNSSLALGMQMRPQLLLSRCRCLPATCASSCKCKECKCTSTARKKSCCSLNPCGLVPKCAPRACICKRGHRRSASLLRLMTGTALLPTYK

SEQ ID NO: 10559 - protein, 92 aa, Homo sapiens
LLLKFFFETGSHSFIQVGVQWCDHDSLDLPGSGDPSSASRVAGTAGMHDHTWLIFVFLVRRWSLTVLLRLVFNSWAKVILHLGLPKGWGLQV

SEQ ID NO: 10560 - protein, 56 aa, Homo sapiens
LLCLGLAYRRHFEMSLWLGMVAHVCNPSAWGGRGGQITRGQEFETSLVNMVKTCLY

SEQ ID NO: 10561 - protein, 127 aa, Homo sapiens
  DOMAIN (68)..(83): WILM'S TUMOUR PROTEIN SIGNATURE domain identified by eMATRIX, accession number PR00049D, p-value=1.610e-09, raw score of 0.00
LREDDRRGHRVGSDSRASCKMLLILLSVALLALSSAQNLNEDVSQEESPSLIAGNPQGPSPQGGNKPQGPPPPPGKPQGPPPQGGNKPQGPPPPGKPQGPPPQGDKSRSPRSPPGKPQGPPQGQSPQ

SEQ ID NO: 10562 - protein, 341 aa, Homo sapiens
RAFRFDDTMAGGGCRAGPGATCSDGDAGSDQRQNEEIEAMAAIYGEEWCVIDDCAKIFCIRISDDIDDPTWTLCLHVMLPNEYPCTAPPIYQLNAPWLKGQERADLSNSLEEIYIQNIAESILYLWVEKIRDVLIQKSQMTEPGPDVKKKTEEEDVECEDDLILACQPESSLKALDFEVSEARTEVEVEELPPIDHGIPITDRRSTFQAHLAPVVCPKQVKMGLSKLYENKKIASATHNIYAYRIYCEDKQTFLQDCEDDGETVAGGRLLHLMEILSVKDVMGVRARWYVGMGLGPDRFKHINNCVRNILVEKNYTSSLEESSKALGKNKKVRKDKKRNEH

SEQ ID NO: 10563 - protein, 23 aa, Homo sapiens
MVAHACNPSTLGDRGGRFTRSGD

SEQ ID NO: 10564 - protein, 12 aa, Homo sapiens
MTQLTKRKETIL

SEQ ID NO: 10565 - protein, 95 aa, Homo sapiens
LDVTTSKNQFVLRTWLKIPGNCYRRHFFFFETESCSVAQAGVQWHNLSSLQAPPPGSRHSPTSASQAAGTYRYPAHHAWPNFVFVFLVETGFHPC

SEQ ID NO: 10566 - protein, 78 aa, Homo sapiens
SAFGLLLAWFRFLAAKQAKNVALDCGGVSRLVIFVSWRNPQVAPTSAHQNRPSRNPVSRPPNTQRVARRKHYALADGY

SEQ ID NO: 10567 - protein, 274 aa, Homo sapiens
  misc_feature (1)...(274): Xaa = X or * as defined in Table 2
VLLACFWPGSDFWPRSRRKTYGTAPQSCYSFYVALDCGGVSRLVIFVSWRNPQVAPTSAHQNRPSRNPVSRPPNTQRVARRKHYALADGYTERRWTNAPCRAESSFPPNCPSAAPIPDSYDKXPSRATLFTSHLTVEAFPVWSYLYPGETPRLHPRAHTRTVPAAIRYPDRQTPNGLRGANTMHSQMDTLNGDGRTHLAGQRARSPRTARPQRQYRIHTTSDLPGLVRKYASGCCLRIWYCCAWIERALSLQVGGGVFGDPLSEGQAECDHGST

SEQ ID NO: 10568 - protein, 206 aa, Homo sapiens
  DOMAIN (56)..(71): WILM'S TUMOUR PROTEIN SIGNATURE domain identified by eMATRIX, accession number PR00049D, p-value=1.610e-09, raw score of 0.00
  misc_feature (1)...(206): Xaa = X or * as defined in Table 2
SDSRASCKMLLILLSVALLALSSAQNLNEDVSQEESPSLIAGNPQGPSPQGGNKPQGPPPPPGKPQGPPPQGGNKPQGPPPPGKPQGPPPQGDKSRSPRSPPGKPQGPPPQGGXLQGPPPRGGIKPQGPPPPGKPQGPPAQGGSKSQSARAPPGKPQGPPQQEGNNPQGPPPPAGGNPQQPQAPPAGQPQGPPRPPQGGRPSRPPQ

SEQ ID NO: 10569 - protein, 1038 aa, Homo sapiens
  DOMAIN (722)..(733): LACI BACTERIAL REGULATORY PROTEIN HTH SIGNATURE domain identified by eMATRIX, accession number PR00036B, p-value=7.375e- 12, raw score of 10.57
  DOMAIN (767)..(1000): Periplasmic binding proteins and suga domain identified by PFam, accession name Peripla_BP_like, E-value=1.4e-05, PFam score of 3.5
MLQQDSNDDTKDVSLFDAEEETTNRPRKVKIRHPVASFFHLFFRVSAIIVCLLCELLSSSFITCMSKKWLAVVIVGVVLQGANLYGYLRCKGQEVRETFAEPSLQATQMKLKRARLADDLNEKIAQRPGPMELVEKNILPVDSSVKEAIIGKTLKIYYLGAPAEAATKEDERTTSGPGHHATNYHFLLKFDFYLSWLHFVHKDAILSGHPLVRLLSTRVLRGPNDVFHGVSSVDSVLAIFVLAEPMGSLSASLENQLEAFLDGTLPSANEIPPLQSSSEDREPFSLIEDLQNDLLSHSGMLDHSHSPMETSETQFAAGFRLLRSQNRKPGQKQPKGTLEQTSEYPGNRGIPIIRQSLVFRVSVTGTTVNFCDASTNHNRVFKVLQALPLDSLHNVLVFLSMPVVAFSVINIVLTLSSFLWLNRPLACLFILARLHQYFIMTYGIVIDRSMIANIIDTTPAESYALMTPPMSSTLGFSGVLAALIACWIQIKPATSRLRSVLFRGANILVSVLLILLVAALFYKDYASLFRNNKELVKSLSPSNSIVASWSWYSHQRLANLPLVRIGEDAHRNPLMQNEQRKNLTILMVGATSRAENFSLNGYPRETNPRLAKDNVVYFPNTASCGTATAVSVPCMFSDMPREHYKEELAQHQEGVARISFSERASTVLWNDNDGGCKGACDRVGCLNLVYIGEACNDHLAKKPPKGQREKHLPGATTEYAGVSYQTVSRVVNQASHVSAKTREKVEAAMAELNYIPNRVAQQLAGKQSLLIGVATSSLALHAPSQIVAAIKSRADQLGASVVVSMVERSGVEACKAAVHNLLAQRVSGLIINYPLDDQDAIAVEAACTNVPALFLDVSDQTPINSIIFSHEDGTRLGVEHLVALGHQQIALLAGPLSSVSARLRLAGWHKYLTRNQIQPIAEREGDWSAMSGFQQTMQMLNEGIVPTAMLVAHFRLRVCAVVTSPSLSPSLAPVPSVAAAVLLVSLSPVKTKPVVEHKYAGGQCLVHIQALMNEDTEKHQVHYSTPKCGRHAQWSDAY

SEQ ID NO: 10570 - protein, 132 aa, Homo sapiens
  misc_feature (1)...(132): Xaa = X or * as defined in Table 2
TSSLSLSGKSGRYIVFLRRSVGIQSPSAVATVRLLLAGSDRRFAAGSAGCAVLSRAERSXEPGCCYRIRRSAFRLRAGSIGNRDKPVAWPDTGSGDNTEVYFRAHQAGILPDTVLAGPAQRVAVSGGTPVDW

SEQ ID NO: 10571 - protein, 62 aa, Homo sapiens
GNRAGALPGATLLILAGFLPSAHQNRPSRNPVSRPPNTQRVARRKHYALADGYTERRWTNAP

SEQ ID NO: 10572 - protein, 185 aa, Homo sapiens
  misc_feature (1)...(185): Xaa = X or * as defined in Table 2
MPDLVEGREKSDKGAQPQPRTQSRSARTNGSGVRILHSLWRIIGIPLLLGYSLVCSRVLLACFWPGSDFWPRSRRKTYGTAPQSCYSFYVALDCGGVSRLVIFVSWRNPQVAPTSAHQNRPSRNPVSRPPNTQRVARRKHYALADGYTERRWTDAPCRAESSFPPNCPLXRQYRIHIVDASVCGP

SEQ ID NO: 10573 - protein, 157 aa, Homo sapiens
PESFSCIAAERFLARRRKKKSEVTSRPKQARAWRPVLKLASDGKARLAVCCRRWSRDLALSPGRPPAPVPGIRSPRMSESFFLGLFGHSWPVATERTFFPARVSPPAGDSGLLSRDAGTPVACEASFIFIAPSSPCRIIPGSGRNEGLLLLASTGTS

SEQ ID NO: 10574 - protein, 212 aa, Homo sapiens
LSVVRSRIHMGVGVGVGCPVRYRNQDDHELQITHGNKILCGIVCDKGAQPQPRTQSRSARTNGSGVRILHSLWRIIGIPLLLGYSLVCSRVLLACFWPGSDFWPRSRRKTYGTVPQSCYSFYVALDCGGVSRLVIFVSWRNPQVAPTSAHQNRPRRNPVSRPPNTQRVARRKHYAPADGYTERRWTIAPCRAESSFPPNCPSAAPIPDSYDK

SEQ ID NO: 10575 - protein, 1003 aa, Homo sapiens
  DOMAIN (69)..(118): Sodium:galactoside symporter family proteins domain identified by eMATRIX, accession number BL00872A, p-value=2.800e- 39, raw score of 30.73
  DOMAIN (324)..(354): Phosphoribulokinase domain identified by PFam, accession name PRK, E-value=0.0089, PFam score of 13.2
  misc_feature (1)...(1003): Xaa = X or * as defined in Table 2
MVYKMRYRSQHPYSIKEKQMKSEVLSVKEKIGYGMGDAASHIIFDNVMLYMMFFYTDIFGIPAGFVGTMFLVARALDAISDPCMGLLADRTRSRWGKFRPWVLFGALPFGIVCVLAYSTPDLSMNGKMIYAAITYTLLTLLYTVVNIPYCALGGVITNDPTQRISLQSWRFVLATAGGMLSTVLMMPLVNLIGGDNKPLGFQGDLSPMFSTPEEIARPGPYENDVHVVGASSLAAGHKTLIPELVRSAEQHMGTRRYLRGRRVAVIPPTGLRLPARARQWRRFMVQHTRPGHDAGGKASPRHQALSTQLLDAIMPYCGNTLRLGVTGTPGAGKSTFLEAFGMLLIREGLKVAVIAVDPSSPVTGGSILGDKTRMNDLARAEAAFIRPVPSSGHLGGASQRARELMLLCEAAGYDVVIVETVGVGQSETEVARMVDCFISLQIAGGGDDLQGIKKGLMEVADLIVINKDDGDNHTNVAIARHMSRVPCIFCDDRLCIVFLETLRSTCFLEPLWPICCPRTAMATLGPRNRYGFDPLAVSSGTRSCSLGVPRAHRFALAGSRDPGYTHKRVLAIFQAFNAFPEPPANTPEDPAGLSLLPSGHTSAREPGLCLPINSLCPIVQSLWPSSLRSTQPLTPLPSCPSQAHHPGSVAPCGAAWYPAGHTHRKLPGVFSQRPRSHGGGTRWHSSTSVGTDQAAGTGADSPGRSDARRQGSAGKRAAGPSLGQSQDGDPARTSRQQGHSAAAGNRGRAGFGQRHRAERQQLWGPSSREGGVGAREEQEQFGDRGSGVAGLESGSRSGDWLPQFAGQWPRLREAVSQRRAHAAHGRTAAACGYCTHFGGLSEYLCYWGIRWFVLECFWPAFGLVPIFGRRSRRKTYGTVPQSCXLFLRRTXRGGVSRLVIFVSWRNPQVAPTSAHQNRPSRNPVSRPPNTQRVARRKHYALADGYTERRWTNAPCRAESSFPPNCPSGAPIPDSYDKXPSRSGVLIKACLRARAPTRYPVYRT

SEQ ID NO: 10576 - protein, 196 aa, Homo sapiens
  misc_feature (1)...(196): Xaa = X or * as defined in Table 2
ILHAPAPPFSASASHEQPEWSDKGAQPQPRTQSRSARTNGSGVRILHSLWRIIGIPLLLGYSLVCSRVLLACFWPGSDFWPRSRRKTYGTAPQSCYSFYVALDCGGVSRLVIFVSWRNPQVAPTSAHQNRPSRNPVSRPPNTQRVARRKHYALADGYTERRWTNAPCRAESSFPPNCPFAAPIPDSYDKXPFRIVS

SEQ ID NO: 10577 - protein, 200 aa, Homo sapiens
RASVQQKKLSTDDKGAQPQPRTQSRSARTNGSGVRILHSLWRIIGIPLLLGYSLVCSRVLLACFWPGSDFWPRSRRKTYGTAPQSCYSFYVALDCGGVSRRSYLYPGETPRVAPTSAHQNRPSRKPGTRPPNTQRVARRKHYALADGYTERSATNAPCRAESSFPPELPVPQVPNTGFIRQVTFRDCFVNTPQAAASGFW

SEQ ID NO: 10578 - protein, 176 aa, Homo sapiens
QRYSDNPPNDKGAQPQPRTQSRSARTNGSGVRILHSLWRIIGIPLLLGYSLVCSRVLLACFWPGSDFWPRSRRKTYGTAPQSCYSFYVALDCGGVSRLVIFVSWRNPQVAPTSAHQNRPSRNPVSRPPNTQRVARRKHYALADGYTERRWTNAPCRAVEPFPPNCPWEAQYRIIRK

SEQ ID NO: 10579 - protein, 36 aa, Homo sapiens
FVEPIRRQRTARSPASPRLQCTRARTGAWARCCETS

SEQ ID NO: 10580 - protein, 90 aa, Homo sapiens
LGPGKSLLCGYLVAMTDVETTYADFIASGRTGRRNAIHDILVSSASGNSNELALKLAGLDINKTEGEEDAQRSSTEQSGEAQGEAAKSES

SEQ ID NO: 10581 - protein, 48 aa, Homo sapiens
  misc_feature (1)...(48): Xaa = X or * as defined in Table 2
KKGVLSCVRRHSMETXNEKPALLKMSGIKIPSPVHHFVFHKQSEKGAV

SEQ ID NO: 10582 - protein, 99 aa, Homo sapiens
IKDKKVSNQSLLCGYLVAMTDVETTYADFIASGRTGRRNAIHDILVSSASGNSNELALKLAGLDINKTEGEEDAQRSSTEQSGEAQGEAAKSESLTPHF

SEQ ID NO: 10583 - protein, 118 aa, Homo sapiens
  DOMAIN (12)..(48): Synapsins proteins domain identified by eMATRIX, accession number BL00415Q, p-value=4.405e-09, raw score of 2.23
RVGEYDGYEAGPAPCPPRASLCQPGPDQGPPSCTQAIPAPRKPHPCPWPQGPKKLGELPGLCLQGSPTAGHPPCPPQETGAQGGAPASPWFSQNNAACGLICFCPPQPRIFLCINSNS

SEQ ID NO: 10584 - protein, 167 aa, Homo sapiens
  DOMAIN (34)..(86): Histone H3 proteins domain identified by eMATRIX, accession number BL00322A, p-value=1.000e-40, raw score of 9.23
KKMARTKQTARKSTGGKAPRQTAGLATKAARKSAPSTGGVKKPHRYRPGTVALREIRRYQKSTELLIRKLPFQRLVREIAAGFSKTALRFQSARIRCACRRLAKRYLVGLFEDNNLCAIHAKRVTIHAPKTIQLARRDTGEKRALSEGSFYGVLLVKFLLKYFGLIC

SEQ ID NO: 10585 - protein, 143 aa, Homo sapiens
  DOMAIN (65)..(103): Synapsins proteins domain identified by eMATRIX, accession number BL00415O, p-value=9.704e-09, raw score of 3.44
GKLSGRGTGSLLRGDALPRLQKTGCPKAGGNRPPAVSQSRGGAVRDEGLLAAQTAEGGPRVEEARPPQLPQARGSLPETPPPPAPDATPPPPSGSHISPSSAEGPSRPPPVGAVDSGGAPQPQDPGPAPAPALLRHRHQTPRP

SEQ ID NO: 10586 - protein, 98 aa, Homo sapiens
  DOMAIN (68)..(81): LDL-receptor class A (LDLRA) domain proteins domain identified by eMATRIX, accession number BL01209, p-value=1.978e-11, raw score of 9.31
  DOMAIN (5)..(86): Low-density lipoprotein receptor domain identified by PFam, accession name ldl_recept_a, E-value=5.5e-20, PFam score of 79.8
ACVPKTCPSSYFHCDNGNCIHRAWLCDRDNDCGDMSDEKDCPTQPFRCPSWQWQCLGHNICVNLSVVCDGIFDCPNGTDESPLCSKFPDHSLLAINSF

SEQ ID NO: 10587 - protein, 376 aa, Homo sapiens
  DOMAIN (94)..(110): Calcium-binding EGF-like domain proteins pattern proteins domain identified by eMATRIX, accession number BL01187B, p-value= 7.171e-10, raw score of 12.04
  DOMAIN (86)..(162): EGF-like domain identified by PFam, accession name EGF, E- value=7.6e-05, PFam score of 29.5
MPIENVSGTEIGWRAQRGTIPLQCGGRDDSVNEGEWPADTWTRGIERMPRLCCHLAEPLPVAGYSGYSFCQDLTAVLTRFPVPNLCKQICSHLCLLRPGGYSCACPQGSSFIEGSTTECDAAIELPINLPPPCRCMHGGNCYFDETDLPKCKCPSGYTGKYCEMAFSKGISPGTTAVAVLLTILLIVVIGALAIAGFFHYRRTGSLLPALPKLPSLSSLVKPSENGNGVTFRSGADLNMDIGVSGFGPETAIDRSMAMSEDFVMEMGKQPIIFENPMYSARDSAVKVVQPIQGRKHSEWSMLQLPYLQEQDQPKDIRPENNQNPVLLHSGGGLAAMPGCWPRTFHFEWCQSKRGLSPFRGLGNTVPEAPQLLYKYL

SEQ ID NO: 10588 - protein, 409 aa, Homo sapiens
  DOMAIN (90)..(112): LOW DENSITY LIPOPROTEIN (LDL) RECEPTOR SIGNATURE domain identified by eMATRIX, accession number PR00261B, p-value=8.235e- 20, raw score of 14.12
  DOMAIN (34)..(195): Low-density lipoprotein receptor domain identified by PFam, accession name ldl_recept_a, E-value=5.4e-32, PFam score of 119.7
  misc_feature (1)...(409): Xaa = X or * as defined in Table 2
MRTLLKNTVIVLLPYKGSGKLYGESSTELNVEVLNCTASQFKCASGDKCIGVTNRCDGVFDCSDNSDEAGCPTRPPGMCHSDEFQCQEDGICIPNFWECDGHPDCLYGSDEHNACVPKTCPSSYFHCDNGNCIHRAWLCDRDNDCGDMSDEKDCPTQPFRCPSWQWQCLGHNICVNLSVVCDGIFDCPNGQMSPHFALVAAAVDWLSQDSKWLQDSHIVPDVKLCVVASAYRQSYQSLGNDISLGYRCQPKFSRSIDPTGKAVQTADIRLSARATLWLGGSIEESPVLCSTLRLLLRRLPPPLTWTSPNRPTQPCTAQTQTNQSVGIAAPSAIRVIYPESVVLNAVIYLPGDPEVSGLPRAFKRRFSVEVRLDCGTFKLLLVYCTHPGDIKVNTCKTGALVAFRCFLPX

SEQ ID NO: 10589 - protein, 622 aa, Homo sapiens
  DOMAIN (125)..(146): COMPLEMENT C9 SIGNATURE domain identified by eMATRIX, accession number PR00764B, p-value=5.143e-14, raw score of 13.56
  DOMAIN (86)..(199): Low-density lipoprotein receptor domain identified by PFam, accession name ldl_recept_a, E-value=5e-29, PFam score of 109.9
  misc_feature (1)...(622): Xaa = X or * as defined in Table 2
MGKVPMRSEKPAHEVRASTISTTPDLSSIESFFSRGPESTNHTSIKGRPLTAELKNKTNRAEEKIKKEELAISGVDEDDGGKGIKDTGDLVEMVDLAFRCDRHNDCGDYSDERGCLYQTCQQNQFTCQNGRCISKTFVCDEDNDCGDGSDELMHLCHTPEPTCPPHEFKCDNGRCIEMMKLCNHLDDCLDNSDEKGCGEFIFRASSPGAILILIVAVSTIHIAITDPRLGNALPVRRIVQPQYSWTPLTLKLWASRVSNCQGLLSAAKTHHTVQFSILMALPKGHLFSARLTGKCVAQVIVEGFFAGRDKFVCVLNVAFVPYQFVLSLVRTGTASKSTVGFYRNNISVITGFLIGFLCQSSALDLETFTVVSHFYFGINECHDPSISGCDHNCTDTLTSFYCSCRPGYKLMSDKRTCVDIDECTEMPFVCSQKCENVIGSYICKCAPGYLREPDGKTCRQNSNIEPYLIFSNRYYLRNLTIDGYFYSLILEGLDNVVALDFDRVEKRLYWIDTQRQVIERMFLNKTNKETIINHRLPAAESLAVDWVSSALKGGFVHPLNGGSQHFTLLVDXVIKWLYLISNSVPCXKRRWGLPVFWFGGKREMSWEMMGHXLVEGLCGCCH

SEQ ID NO: 10590 - protein, 31 aa, Homo sapiens
RRRSSTRTARSPASPRLQCTRARTGAWARCC

SEQ ID NO: 10591 - protein, 990 aa, Homo sapiens
  DOMAIN (135)..(905): Low-density lipoprotein receptor repeat domain identified by PFam, accession name ldl_recept_b, E-value=9.2e-35, PFam score of 128.9
MEKQSINQQLPYPDQLPTQCSPLTGLNEYPLSGVSIPDESWDRKSKHSAAMTLRQVHQRHQNNLFLDHNTNVEEYSAQMRIGTHCCCTSSESLLLLVASQNKIIADSVTSQVHNIYSLVENGSYIVAVDFDSISGRIFWSDATQGKTWSAFQNGTDRRVVFDSSIILTETIAIDWVGRNLYWTDYALETIEVSKIDGSHRTVLISKNLTNPRGLALDPRMKLLYFMDSYLDYMDFCDYNGHHRRQVIASDLGFEVGPKLLALPPQLVLTESSTCRPGDWPASPLEPPPTSMHTACDPENHLTSATAITYAMSAVQGRNALHVDVDVSSGFIYWCDFSSSVASDNAIRRIKPDGSSLMNIVTHGIGENGVRGIAVDWVAETKIERSFLDCTNRTVLVSEGIVTPRGLAVDRSDGYVYWVDDSLDIIARIRINGENSEVIRYGSRYPTPYGITVFENSIIWVDRNLKKIFQASKEPENTEPPTVIRDNINWLRDVTIFDKQVQPRSPAEVNNNPCLENNGGCSHLCFALPGLHTPKCDCAFGTLQSDGKNCAISTENFLIFALSNSLRSLHLDPENHSPPFQTINVERTVMSLDYDSVSDRIYFTQNLASGVGQISYATLSSGIHTPTVIASELQMKLLNLHSAGPRQRIERSTLTGVDREVIVNAAVHAFGLTLYGQYIYWTDLYTQRIYRANKYDGSGQIAMTTNLLSQPRGINTVVKNQKQQCNNPCEQFNGGCSISVHQKWKNFLSVRFSKHGWFISVSKDLMKNDQPFLITVRQHIIFGISLNPEVKSNDAMVPIAGIQNGLDVEFDDAEQYIYWVENPGEIHRVKTDGTNRTVFASISMVGPSMNLALDWISRNLYSTNPRTQSIEVLTLHGDIRYRKTLIANDGTALGVGFPIGITVDPARGICISTVTTNSCKAETNFETTEAVMEGEGTQHVGGNGNAGCVGVGGGDAASQTKSTNTYIVILDSGYCLNNPLGLLSRKNYLLS

SEQ ID NO: 10592 - protein, 1105 aa, Homo sapiens
  DOMAIN (432)..(448): Calcium-binding EGF-like domain proteins pattern proteins domain identified by eMATRIX, accession number BL01187B, p-value= 2.800e-14, raw score of 12.04
  DOMAIN (357)..(1074): Low-density lipoprotein receptor domain identified by PFam, accession name ldl_recept_a, E-value=1.9e-98, PFam score of 340.5
  misc_feature (1)...(1105): Xaa = X or * as defined in Table 2
RHKKPFKKSMNPGAGMLYWSDQGTDSGVPAKIASANMDGTSVKTLFTGNLEHLECVTLDIEEQKLYWAVTGRGVIERGNVDGTDRMILVHQLSHPWGIAVHDSFLYYTDEQYEVIERVDKATGANKIVLRDNVPNLRGLQVYHRRITEPCPNXPKTIKIGHYIKDKPTCSSEAKWYLPHPGQMXIADKPEAQRGSRRLTDLEGGNNEIDWSISCDCIYPSSQVFDLSAKIEGKVDKRTCCPSSFPKGYGPIAKNSQVYESSSANTDSVAVVGGVCFALWSSRVAGLRRVQREETQLEEPFYTNPCKGTNQDSRERNWPXRRNKYSYPXKWLSAPCSAKVHSAAAREXGSCHTLSXWSYCQATMFECKNHVCIPPYWKCDGDDDCGDGSDEELHLCLDVPCNSPNRFRCDNNRCIYSHEVCNGVDDCGDGTDETEEHHCRNTKGSYECVCADGFTSMSDRPGKRCAAEGSSPLLLLPDNVRIRKYNLSSERFSEYLQDEEYIQAVDYDWDPKDIGLNSNNNKRSQICLSSFXVFCXGSLLVTPNLYNREEQKSECCSCPCLRPWPIHSNNRSSMLRSCEDKASTCKRELSIGDDDSYLRPIDGQAIGPSKSSVYYRQECDGQNDCGDNSDEENCAPRECTESEFRCVNQQCIPSRWICDHYNDCGDNSDERDCEMRTCHPEYFQCTSGHCVHSELKCDGSADCLDASDEADCRNPYTFTWYRLSALGPGVCPAGFSDSTFPYTKNASRNSKLKVRFSSTHLQIMLQGIKITHYKVTKWISLQTKIXTNYQLXKSNLCTDWRTSKRKVLLRHHLHHLRSLLSLSLLREETQLQPNSATEDTFKDTANLVKEDSEGHERAHACHFLEFSVDFFSPDNCCPWCFAKEVLYASLCRCIPIWWKCDGQKDCSDGSDELALCPQRFCRLGQFQCSDGNCTSPQTLCNAHQNCPDGSDEDRLLCCANKRCIPESWQCDTFNDCEDNSDEDSSHCASRTCRPGQFRCANGRCIPQAWKCDVDNDCGDHSDEPIEECMSSAHLCDNFTEFSCKTNYRCIPKWAVCNGVDDCRDNSDEQGCGAKGSGSADTTWTLLAVEAAVQKALEGLRFAGVFC

SEQ ID NO: 10593 - protein, 3575 aa, Homo sapiens
  DOMAIN (124)..(139): VWFC domain proteins domain identified by eMATRIX, accession number BL01208B, p-value=9.156e-10, raw score of 15.83
  misc_feature (1)...(3575): Xaa = X or * as defined in Table 2
MAGAPPPASLPPCSLISDCCASNQRDSVGVGPSEPGVGYSLVVRRFLSRSEKRNIRVGVTRFSRELPDPLRFPEHLFFTDWRLGAIIRVRKADGGEMTVIRSGIAYILHLKSYDVNIQTGSNACNQPTHPNGDCSHFCFPVPNFQRVCGCPYGMRLASNHLTCEGDPTNEPPTEQCGLFSFPCKNGRCVPNYYLCDGVDDCHDNSDEQLCGTLNNTCSSSAFTCGHGECIPAHWRCDKRNDCVDGSDEHNCPNPTQPASCLDTQYTCDNHQCISKNWVCDTDNDCGDGSDEKNCILNCTASQFKCASGDKCIGVTNRCDGVFDCSDNSDEAGCPTRPPGMCHSDEFQCQEDGICIPNFWECDGHPDCLYGSDEHNACVPKTCPSSYFHCDNGNCIHRAWLCDRDNDCGDMSDEKDCPTQPFRCPSWQWQCLGHNICVNLSVVCDGIFDCPNGTDESPLCNGNSCSDFNGGCTHECVQEPFGAKCLCPLGFLLANDSKTCEDIDECDILGSCSQHCYNMRGSFRCSCDTGYMLESDGRTCKVTASESLLLLVASQNKIIADSVTSQVHNIYSLVENGSYIVAVDFDSISGRIFWSDATQGKTWSAFQNGTDRRVVFDSSIILTETIAIDWVGRNLYWTDYALETIEVSKIDGSHRTVLISKNLTNPRGLALDPRMNEHLLFWSDWGHHPRIERASMDGSMRTVIVQDKIFWPCGLTIDYPNRLLYFMDSYLDYMDFCDYNGHHRRQVIASDLIIRHPYALTLFEDSVYWTDRATRRVMRANKWHGGNQSVVMYNIQWPLGIVAVHPSKQPNYDQPFLITVRQHIIFGISLNPEVKSNDAMVPIAGIQNGLDVEFDDAEQYIYWVENPGEIHRVKTDGTNRTVFASISMVGPSMNLALDWISRNLYSTNPRTQSIEVLTLHGDIRYRKTLIANDGTALGVGFPIGITVDPARGKLYWSDQGTDSGVPAKIASANMDGTSVKTLFTGNLEHLECVTLDIEEQKLYWAVTGRGVIERGNVDGTDRMILVHQLSHPWGIAVHDSFLYYTDEQYEVIERVDKATGANKIVLRDNVPNLRGLQVYHRRNAAESSNGCSNNMNACQQICLPVPGGLFSCACATGFKLNPDNRSCSPYNSFIVVSMLSAIRGFSLELSDHSETMVPVAGQGRNALHVDVDVSSGFIYWCDFSSSVASDNAIRRIKPDGSSLMNIVTHGIGENGVRGIAVDWVAGNLYFTNAFVSETLIEVLRINTTYRRVLLKVTVDMPRHIVVDPKNRYLFWADYGQRPKIERSFLDCTNRTVLVSEGIVTPRGLAVDRSDGYVYWVDDSLDIIARIRINGENSEVIRYGSRYPTPYGITVFENSIIWVDRNLKKIFQASKEPENTEPPTVIRDNINWLRDVTIFDKQVQPRSPAEVNNNPCLENNGGCSHLCFALPGLHTPKCDCAFGTLQSDGKNCAISTENFLIFALSNSLRSLHLDPENHSPPFQTINVERTVMSLDYDSVSDRIYFTQNLASGVGQISYATLSSGIHTPTVIASGIGTADGIAFDWITRRIYYSDYLNQMINSMAEDGSNRTVIARVPKPRAIVLDPCQGYLYWADWDTHAKIERATLGGNFRVPIVNSSLVMPSGLTLDYEEDLLYWVDASLQRIERSTLTGVDREVIVNAAVHAFGLTLYGQYIYWTDLYTQRIYRANKYDGSGQIAMTTNLLSQPRGINTVVKNQKQQCNNPCEQFNGGCSHICAPGPNGAECQCPHEGNWYLANNRKHCIVDNGERCGASSFTCSNGRCISEEWKCDNDNDCGDGSDEMESVCALHTCSPTAFTCANGRCVQYSYRCDYYNDCGDGSDEAGCLFRDCNATTEFMCNNRRCIPREFICNGVDNCHDNNTSDEKNCPTHTCSSSEFQCASGRCIPQHWYCDQETDCFDASDEPASCGHSERTCLADEFKCDGGRCIPSEWICDGDNDCGDMSDEDKRHQCQNQNCSDSEFLCVNDRPPDRRCIPQSWVCDGDVDCTDGYDENQNCTRRTCSENEFTCGYGLCIPKIFRCDRHNDCGDYSDERGCLYQTCQQNQFTCQNGRCISKTFVCDEDNDCGDGSDELMHLCHTPEPTCPPHEFKCDNGRCIEMMKLCNHLDDCLDNSDEKGCGINECHDPSISGCDHNCTDTLTSFYCSCRPGYKLMSDKRTCVDIDECTEMPFVCSQKCENVIGSYICKCAPGYLREPDGKTCRQNSNIEPYLIFSNRYYLRNLTIDGYFYSLILEGLDNVVALDFDRVEKRLYWIDTQRQVIERMFLNKTNKETIINHRLPAAESLAVDWVSRYLYWADWGHRAYIGRVGMDGTNKSVIISTKLEWPNGITIDYTNDLLYWADAHLGYIEYSDLEGHHRHTVYDGALPHPFAITIFEDTIYWTDWNTRTVEKGNKYDGSNRQTLVNTTHRPFDIHVYHPYRQPIVSNPCGTNNGGCSHLCLIKPGGKGFTCECPDDFRTLQLSGSTYCMPMCSSTQFLCANNEKCLSSPWTDIDLQGSKGWEFSRPRESSCMSFLGIQCXLLLSRXLLPLVLCXRSAVCSLCRCIPIWWKCDGQKDCSDGSDELALCPQRFCRLGQFQCSDGNCTSPQTLCNAHQNCPDGSDEDRLLCCANKRCIPESWQCDTFNDCEDNSDEDSSHCASRTCRPGQFRCANGRCIPQAWKCDVDNDCGDHSDEPIEECMSSAHLCDNFTEFSCKTNYRCIPKWAVCNGVDDCRDNSDEQGCEERTCHPVGDFRCKNHHCIPLRWQCDGQNDCGDNSDEENCAPRECTESEFRCVNQQCIPSRWICDHYNDCGDNSDERDCEMRTCHPEYFQCTSGHCVHSELKCDGSADCLDASDEADCPTRFPDGAYCQATMFECKNHVCIPPYWKCDGDDDCGDGSDEELHLCLDVPCNSPNRFRCDNNRCIYSHEVCNGVDDCGDGTDETEEHCRKPTPKPCTEYEYKCGNGHCIPHDNVCDDADDCGDWSDELGCNINECEQFGTCPQHCRNTKGSYECVCADGFTSMSDRPGKRCAAEGSSPLLLLPDNVRIRKYNLSSERFSEYLQDEEYIQAVDYDWDPKDIGLSVVYYTVRGEGSRFGAIKRAYIPNFESGRNNLVQEVDLKLKYVMQPDGIAVDWVGRHIYWSDVKNKRIEVAKLDGRYRKWLISTDLDQPAAIAVNPKLGLMFWTDWGKEPKIESAWMNGEDRNILVFEDLGWPTGLSIDYLNNDRIYWSDFKEDVIETIKYDGTDRRVIAKEVPNLCKQICSHLCLLRPGGYSCACPQGSSFIEGSTTECDAAIELPINLPPPCRCMHGGNCYFDETDLPKCKCPSGYTGKYCEMAFSKGISPGTTAVAVLLTILLIVVIGALAIAGFFHYRRTGSLLPALPKLPSLSSLVKPSENGNGVTFRSGADLNMDIGVSGFGPETAIDRSMAMSEDFVMEMGKQPIIFENPMYSARDSAVKVVQPIQVTVSENVDNKNYGSPINPSEIVPETNPTSPAADGTQVTKWNLFKRKSKQTTNFENPIYAQMENEQKESVAATPPPSPSLPAKPKPPSRRDPTPTYSATEDTFKDTANLVKEDSEV

SEQ ID NO: 10594 - protein, 4697 aa, Homo sapiens
  DOMAIN (1013)..(1028): VWFC domain proteins domain identified by eMATRIX, accession number BL01208B, p-value=9.156e-10, raw score of 15.83
SWRRCRPKGAFASRGAAGAVCYARPPPGEGTARPGTIAEMDRGPAAVACTLLLALVACLAPASGQECDSAHFRCGSGHCIPADWRCDGTKDCSDDADEIGCAVVTCQQGYFKCQSEGQCIPSSWVCDQDQDCDDGSDERQDCSQSTCSSHQITCSNGQCIPSEYRCDHVRDCPDGADENDCQYPTCEQLTCDNGACYNTSQKCDWKVDCRDSSDEINCTEICLHNEFSCGNGECIPRAYVCDHDNDCQDGSDEHACNYPTCGGYQFTCPSGRCIYQNWVCDGEDDCKDNGDEDGCESGPHDVHKCSPREWSCPESGRCISIYKVCDGILDCPGREDENNTSTGKYCSMTLCSALNCQYQCHETPYGGACFCPPGYIINHNDSRTCVEFDDCQIWGICDQKCESRPGRHLCHCEEGYILERGQYCKANDSFGEASIIFSNGRDLLIGDIHGRSFRILVESQNRGVAVGVAFHYHLQRVFWTDTVQNKVFSVDINGLNIQEVLNVSVETPENLAVDWVNNKIYLVETKVNRIDMVNLDGSYRVTLITENLGHPRGIAVDPTVGYLFFSDWESLSGEPKLERAFMDGSNRKDLVKTKLGWPAGVTLDMISKRVYWVDSRFDYIETVTYDGIQRKTVVHGGSLIPHPFGVSLFEGQVFFTDWTKMAVLKANKFTETNPQVYYQASLRPYGVTVYHSLRQPYATNPCKDNNGGCEQVCVLSHRTDNDGLGFRCKCTFGFQLDTDERHCIAVQNFLIFSSQVAIRGIPFTLSTQEDVMVPVSGNPSFFVGIDFDAQDSTIFFSDMSKHMIFKQKIDGTGREILAANRVENVESLAFDWISKNLYWTDSHYKSISVMRLADKTRRTVVQYLNNPRSVVVHPFAGYLFFTDWFRPAKIMRAWSDGSHLLPVINTTLGWPNGLAIDWAASRLYWVDAYFDKIEHSTFDGLDRRRLGHIEQMTHPFGLAIFGEHLFFTDWRLGAIIRVRKADGGEMTVIRSGIAYILHLKSYDVNIQTGSNACNQPTHPNGDCSHFCFPVPNFQRVCGCPYGMRLASNHLTCEGDPTNEPPTEQCGLFSFPCKNGRCVPNYYLCDGVDDCHDNSDEQLCGTLNNTCSSSAFTCGHGECIPAHWRCDKRNDCVDGSDEHNCPTHAPASCLDTQYTCDNHQCISKNWVCDTDNDCGDGSDEKNCNSTETCQPSQFNCPNHRCIDLSFVCDGDKDCVDGSDEVGCVLNCTASQFKCASGDKCIGVTNRCDGVFDCSDNSDEAGCPTRPPGMCHSDEFQCQEDGICIPNFWECDGHPDCLYGSDEHNACVPKTCPSSYFHCDNGNCIHRAWLCDRDNDCGDMSDEKDCPTQPFRCPSWQWQCLGHNICVNLSVVCDGIFDCPNGTDESPLCNGNSCSDFNGGCTHECVQEPFGAKCLCPLGFLLANDSKTCEDIDECDILGSCSQHCYNMRGSFRCSCDTGYMLESDGRTCKVTASESLLLLVASQNKIIADSVTSQVHNIYSLVENGSYIVAVDFDSISGRIFWSDATQGKTWSAFQNGTDRRVVFDSSIILTETIAIDWVGRNLYWTDYALETIEVSKIDGSHRTVLISKNLTNPRGLALDPRMNEHLLFWSDWGHHPRIERASMDGSMRTVIVQDKIFWPCGLTIDYPNRLLYFMDSYLDYMDFCDYNGHHRRQVIASDLIIRHPYALTLFEDSVYWTDRATRRVMRANKWHGGNQSVVMYNIQWPLGIVAVHPSKQPNSVNPCAFSRCSHLCLLSSQGPHFYSCVCPSGWSLSPDLLNCLRDDQPFLITVRQHIIFGISLNPEVKSNDAMVPIAGIQNGLDVEFDDAEQYIYWVENPGEIHRVKTDGTNRTVFASISMVGPSMNLALDWISRNLYSTNPRTQSIEVLTLHGDIRYRKTLIANDGTALGVGFPIGITVDPARGKLYWSDQGTDSGVPAKIASANMDGTSVKTLFTGNLEHLECVTLDIEEQKLYWAVTGRGVIERGNVDGTDRMILVHQLSHPWGIAVHDSFLYYTDEQYEVIERVDKATGANKIVLRDNVPNLRGLQVYHRRNAAESSNGCSNNMNACQQICLPVPGGLFSCACATGFKLNPDNRSCSPYNSFIVVSMLSAIRGFSLELSDHSETMVPVAGQGRNALHVDVDVSSGFIYWCDFSSSVASDNAIRRIKPDGSSLMNIVTHGIGENGVRGIAVDWVAGNLYFTNAFVSETLIEVLRINTTYRRVLLKVTVDMPRHIVVDPKNRYLFWADYGQRPKIERSFLDCTNRTVLVSEGIVTPRGLAVDRSDGYVYWVDDSLDIIARIRINGENSEVIRYGSRYPTPYGITVFENSIIWVDRNLKKIFQASKEPENTEPPTVIRDNINWLRDVTIFDKQVQPRSPAEVNNNPCLENNGGCSHLCFALPGLHTPKCDCAFGTLQSDGKNCAISTENFLIFALSNSLRSLHLDPENHSPPFQTINVERTVMSLDYDSVSDRIYFTQNLASGVGQISYATLSSGIHTPTVIASGIGTADGIAFDWITRRIYYSDYLNQMINSMAEDGSNRTVIARVPKPRAIVLDPCQGYLYWADWDTHAKIERATLGGNFRVPIVNSSLVMPSGLTLDYEEDLLYWVDASLQRIERSTLTGVDREVIVNAAVHAFGLTLYGQYIYWTDLYTQRIYRANKYDGSGQIAMTTNLLSQPRGINTVVKNQKQQCNNPCEQFNGGCSHICAPGPNGAECQCPHEGNWYLANNRKHCIVDNGERCGASSFTCSNGRCISEEWKCDNDNDCGDGSDEMESVCALHTCSPTAFTCANGRCVQYSYRCDYYNDCGDGSDEAGCLFRDCNATTEFMCNNRRCIPREFICNGVDNCHDNNTSDEKNCPDRTCQSGYTKCHNSNICIPRVYLCDGDNDCGDNSDENPTYCTTHTCSSSEFQCASGRCIPQTFGICDQETDCFDASDEPSSCGHSERTCLSDEFKCDGGRCIPNEWICDGDNDCGDMSDEDKRHQCQNQNCSDSEFPCVNDRPPDRRCIPQSWPPDGDVDCTDGHDEIQNCTRRTCSENEFTCGYGLCIPKIFRCDRHNDCGDYSDERGCLYQTCQQNQFTCQNGRCISKTFVCDEDNDCGDGSDELMHLCHTPEPTCPPHEFKCDNGRCIEMMKLCNHLDDCLDNSDEKGCGINECHDPSISGCDHNCTDTLTSFYCSCRPGYKLMSDKRTCVDIDECTEMPFVCSQKCENVIGSYICKCAPGYLREPDGKTCRQNSNIEPYLIFSNRYYLRNLTIDGYFYSLILEGLDNVVALDFDRVEKRLYWIDTQRQVIERMFLNKTNKETIINHRLPAAESLAVDWVSRKLYWLDARLDGLFVSDLNGGHRRMLAQHCVDANNTFCFDNPRGLALHPQYGYLYWADWGHRAYIGRVGMDGTNKSVIISTKLEWPNGITIDYTNDLLYWADAHLGYIEYSDLEGHHRHTVYDGALPHPFAITIFEDTIYWTDWNTRTVEKGNKYDGSNRQTLVNTTHRPFDIHVYHPYRQPIVSNPCGTNNGGCSHLCLIKPGGKGFTCECPDDFRTLQLSGSTYCMPMCSSTQFLCANNEKCIPIWWKCDGQKDCSDGSDELALCPQRFCRLGQFQCSDGNCTSPQTLCNAHQNCPDGSDEDRLLCENHHCDSNEWQCANKRCIPESWQCDSFNDCEDNSDEDSSHCASRTCRPGQFRCANGRCIPQAWKCDVDNDCGDHSDEPIEECMSSAHLCDNFTEFSCKTNYRCIPKWAVCNGVDDCRDNSDEQGCEERTCHPVGDFRCKNHHCIPLRWKCDGQNDCGDNSDEENCAPRECTESEFRCVNQQCIPSRWICDHYNDLWGDNSDERDCEMRTCHPEYFQCTSGHRVHSELKCDGSADCLDASDEADCPTRFPDGAYCQATMFECKNHVCIPPYWKCDGDDDCGDGSDEELHLCLDVPCNSPNRFRCDNNRCIYSHEVCNGVDDCGDGTDETEEHCRKPTPKPCTEYEYKCGNGHCIPHDNVCDDADDCGDWSDELGCNKGKERTCAENICEQNCTQLNEGGFICSCTAGFETNVFDRTSCLDINECEQFGTCPQHCRNTKGSYECVCADGFTSMSDRPGKRCAAEGSSPLLLLPDNVRIRKYNLSSERFSEYLQDEEYIQAVDYDWDPEDIGLSVVYYTVRGEGSRFGAIKRAYIPNFESGRNNLVQEVDLKLKYVMQPDGIAVDWVGRHIYWSDVKNKRIEVAKLDGRYRKWLISTDLDQPAAIAVNPKLGLMFWTDWGKEPKLESAWMNGEDPNILVFEDLGWPTGLSIDYLNNDRIYWSDFKEDVIETIKYDGTDRRVIAKEAMNPYSLDIFEDQLYWISKEKGEVWKQNKFGQGKKEKTLVVNPWLTQVRIFHQLRYNKSVPNLCKQICSHLCLLRPGGYSCACPQGSSFIEGSTTECDAAIELPINLPPPCRCMHGGNCYFDETDLPKCKCPSGYTGKYCEMAFSKGISPGTTAVAVLLTILLIVVIGALAIAGFFHYRRTGSLLPALPKLPSLSSLVKPSENGNGVTFRSGADLNMDIGVSGFGPETAIDRSMAMSEDFVMEMGKQPIIFENPMYSARDSAVKVVQPIQVTVSENVDNKNYGSPINPSEIVPETNPTSPAADGPQVPKWNLFKRKSKQTTNFENPFYAQMGERVKRESVAATPPPSPSLPAKPKPPSRRDPTPTYSATEDTFKDTANLVKEDSEV

SEQ ID NO: 10595 - protein, 76 aa, Homo sapiens
  misc_feature (1)...(76): Xaa = X or * as defined in Table 2
WQDFYCQXHIFGAAFFTHPDGPSNWAFSNFVMFCHCLPKCWDYRGESPRPAHFKIFVDQCTVVKKKKIRKIKNKFL

SEQ ID NO: 10596 - protein, 113 aa, Homo sapiens
SSVRAVEFPEDASGGSSPSGTSKSDANRASSGGGGGGLMEEMNKLLAKRRKAASQSDKPAEKKEDESQMEDPSTSPSPGTRAATSHLTPQRLAGSPGSGATRWRSLCPRFCPG

SEQ ID NO: 10597 - protein, 265 aa, Homo sapiens
  DOMAIN (210)..(230): HEPARIN BINDING GROWTH FACTOR FAMILY SIGNATURE domain identified by eMATRIX, accession number PR00263D, p-value=7.000e- 23, raw score of 12.89
RTAARGCNGIPGAAAWEAALPRRRPRRHPSVNPRSRAAGSPRTRGRRTEERPSGSRLGDRGRGRALPGGRLGGRGRGRAPERVGGRGRGRGTAAPRAAPAARGSRPGPAGTMAAGSITTLPALPEDGGSGAFPPGHFKDPKRLYCKNGGFFLRIHPDGRVDGVREKSDPHIKLQLQAEERGVVSIKGVVCSNRYLAMKEDGRLLASKCVTDECFFFERLESNNYNTYRSRKYTSWYVALKRTGQYKLGSKTGPGQKAILFLPMSG

SEQ ID NO: 10598 - protein, 868 aa, Homo sapiens [sequence omitted]

SEQ ID NO: 10599 - protein, 73 aa, Homo sapiens
YLIYQSRFFLFSSIRYCQMPMPMGYCNPYAYGQYNMPYPPVYHQSPGQAPYPGTQQPSYPFPQPPQQSYYPQQ

SEQ ID NO: 10600 - protein, 57 aa, Homo sapiens
HVSSRLREFLFKHPKRTATLSMRNTSVMKKGGIFSAEFLKVFLPSLLLSHLLAIGLG

SEQ ID NO: 10601 - protein, 253 aa, Homo sapiens
APLSPGAQLGRGAPTSAFPPPAAEAHPAARRGLRSPQLPSGAMSQNGAPGMQEESLQGSWVELHFSNNGNGGSVPASVSIYNGDMEKILLDAQHESGRSSSKSSHCDSPPSSQTPQDTNRAFETDTHSIGREKQLTVLREDDIERRKEVESILRKNSDWIWDWSSSAGKIFPPKEFLFKTPGSRTATLSMRNTSVLKKGGIFSAEFLKVFLPFSAALSIAWPIGLGIYIGKASDQPSTSTFGWKEPGSLDLVR

SEQ ID NO: 10602 - protein, 1406 aa, Homo sapiens
MLNIVQDSALLEAIGCQMEMGGGENNLKSHSRTNSGISSASGGSTEPTTPDSERPAQALLRDYALNTDSAAGLLIRSIHLVTQRLNSQWRQDMSISLAALELLSGLAKVKVMVDSGDRKRAISSVCTYIVYQCSRPAPLHSRDLHSMIVAAFQCLCVWLTEHPDMLDEKDCLKEVLEIVELGISGSKSKNNEQEVKYKGDKEPNPASMRVKDAAEATLTCLVNETTLIKYSRLPTINKHSFRYFVLDNSVILAMLEQPLGNEQIISHLTICDYHCDPNYPQVHFFFLMVIGISQYVKEACSQTLIAGKGKESEGYRICGYKLFVPEPRPVPKNDVGFKYSVKHRPFPEEVDKIPFVKADLSIPDLHEIVTEELEERHEKLRSGMAQQIAYEIHLEQQSEEELQKRSFPDPVTDCKPPPPAQEFQTARLFLSHFGFLSLEALKEPANSRLPPHLIALDSTIPGFFDDIGYLDLLPCRPFDTVFIFYMKPGQKTNQEILKNVESSRTVQPHFLEFLLSLGWSVDVGRHPGWTGHVSTSWSINCCDDGEGSQQEEVISSEDIGASIFNGQKKVLYYADALTEIAFVVPSPVESLTDSLESNISDQDSDSNMDLMPGILKQPSLTLELFPNHTDNLNSSQRNEHAFLSISRKQWKCLPCESSWMAKPPAQAHTCILVRTKAGPGPGEAAVLVDSRQWEAEDRERSSQRLLRFTYGPSFPAFKVPDEDASLIPPEMDNECVAQTWFRFLHMLRNAFPVVDAALVLLPVTAARLMIFLLGFCHILWGLEVALLLSVPSTDCNPVDLSNPAIISSTPKFQEQFLNVSGMPQELNQYPCLKHLPQIFFRAMRGISCLVDAFLGISRPRSDSAPPTPVNRLSMPQSAAVSTTPPHNRRHRAVTVNKATMKTSTVRVYITIVMLYKVSTAHASKVQHQTSSTSPLSSPNQTSSEPRPLPAPRRPKVNSILNLFGSWLFDAAFVHCKLHNGINRDSSMTAITTQASMEFRRKGSQMSTDTMVSNPMFDASEFPDNYEAGRAEACGTLCRIFCSKKTGEEILPAYLSRFYMLLIQGLQINDYVCHPVLASVILNSPPLFCCDLKGIDVVVPYFISALETILPDRELSKFKSYVNPTELRRSSINILLSLLPLPHHFGTVKSEVVLEGKFSNDDSSSYDKPITFLSLKLRLVNILIGALQTETDPNNTQMILENFPLSELMTEISTGVETTANSSTSLRSTTLEKEVPVIFIHPLNTGLFRIKIQGATGKFNMVIPLVDGMIVSRRALGFLVRQTVINICRRKRLESDSYSPPHVRRKQKITDIVNKYRNKQLEPEFYTSLFQEGILEPDECLQAWITHSGVNGPLETIMRTIVAMPLPRAADVCPLNCAWELPTLHCVFCLLCPRTTGPPAGPSGQRR

SEQ ID NO: 10603 - protein, 556 aa, Homo sapiens
HASDSFRYFVLDNSVILAMLEQPLGNEQNDFFPSVTVLVRGMSGRLAWAQQLCLLPRGAKANQKLFVPEPRPVPKNDVGFKYSVKHRPFPEEVDKIPFVKADLSIPDLHEIVTEELEERHRKLRSGMAQQIAYEIHLEQQSEEELQKRSFPDPVTDCKPPPPAQEFQTARLFLSHFGFLSLEALKEPANSRLPPHLIALDSTIPGFFDDIGYLDLLPCRPFDTVFIFYMKPGQKTNQEILKNVESSRTVQPHFLEFLLSLGWSVDVGRHPGWTGHVSTSWSINCCDDGEGSQQEEVISSEDIGASIFNGQKKVLYYADALTEIAFVVPSPVESLTDSLESNISDQDSDSNMDLMPGILKQPSLTLELFPNHTDNLNSSQRLSPSSRMRKLPQGRPVPPLGPETRVSVVWVERYDDIENFPLSELMTEISTGVETTANSSTSLRSTTLEKEVLVIFIHPLNTGLFRIKIQGATGKFNMVIPLVDGMIVSRRALGFLVRQTVINICRRKRLESDSYSPPHVRRKQKITDIVNKYRNKQLEPEFYTSLFQEVGLKNCSS

SEQ ID NO: 10604 - protein, 100 aa, Homo sapiens
  misc_feature (1)...(100): Xaa = X or * as defined in Table 2
WCSRRRGWYLLLGFHNYWRSSTFLVRCTPSCPGGCCPRYGIYPVRSCPRLPGGVSRYGSIHSGRWCSWSPSWSPWLTSVTPRLYVALMXAVVCPVVGKQP

SEQ ID NO: 10605 - protein, 219 aa, Homo sapiens
GAGPDMVWDTELELALKISKGLQRPIKAHREEREDIGKHESRCVIYFGTAKKWILKDKNGRSRVDVISHRLKVSSGLCKTHEIGFDPLALKCPLRSRTAPWWPLDRVSFDLHHLVIGNFFVGNRKIFLDYLVYGFAHNNRWKLLVQSWSDGCVHRTFGLVKSFSKASFCIFITKQRKSSEDLALKQICANTARVILKLKHFHFVSYMCTFLFTCENGHL

SEQ ID NO: 10606 - protein, 81 aa, Homo sapiens
AAAMSALSLLILGLLTAVPPASCQQGEPAHMILTVGNKADGVLVGTDGRYSSMAASFRSSEHENAYENVPEEEGKVRSTPM

SEQ ID NO: 10607 - protein, 797 aa, Homo sapiens
  misc_feature (1)...(797): Xaa = X or * as defined in Table 2
WCDLGSLQPPPPRFKQFSCLSLPRHSXTSQXPQPPKTQLNFTVAIDFTASNGETRMSEKVGGNPLQPTSLHYMSPYQLSAYAMALKAVGEIIQDYDSDKLFPAYGFGAKLPPEGRISHQFPLNNNDEDPNCAGIEGVLESYFQSLRTVQLYGPTYFAPVINQVASNSWSSVTLGTDSEPAVEVPQYVGIRLLVEGFTIKKPMAMCHRRMGVRPAVPLLTQRGSGEGKDSGTPTHSLHTKAQLPSPHVLRHQGQVLRRQHSKLVGTKALSTTGKALRTLPTAKVFISLPPNLDFKVAPSILKPRKSIREDRNGRSQKTVHTEGDMNMNIKKIVKQATVLTFTTALLAGGATQAFAKENNQKAYKETYGVSHITRHDMLQIPKQQQNEKYQVPQFDQSTIKNIESAKGLDVWDSWPLQNADGTVAEYNGYHVVFALAGSPKDADDTSIYMFYQKVGDNSIDSWKNAGRVFKDSDKFDANDPILKDQTQEWSGSATFTSDGKIRLFYTDYSGKHYGKQSLTTAQVNVSKSDDTLKINGVEDHKTIFDGDGKTYQNVQQFIDEGNYTSGDNHTLRDPHYVEDKGHKYLVFEANTGTENGYQGEESLFNKAYYGGGTNFFRKESQKLQQSAKKRDAELANGALGIIELNNDYTLKKVMKPLITSNTVTDEIERANVFKMNGKWYLFTDSRGSKMTIDGINSNDIYMLGYVSNSLTGPYKPLNKTGLVLQMGLDPNDVTFTYSHFAVPQAKGNNVVITSYMTNRGFFEDKKATFAPSFLMNIKGNKTSVVKNSILEPGQLAVN

SEQ ID NO: 10608 - protein, 121 aa, Homo sapiens
ELLQPMSALSLLILGLLTAVPPASCQQGLGNLQPWMQGLIAAAAFLVLVAIAFAVNHFWGAKEEPESPAHMILTVGNKADGVLVGTDGRYSSMAASFRSSEHENAYENVPEEEGKVRSTPM

SEQ ID NO: 10609 - protein, 135 aa, Homo sapiens
NAATSLTANPDATTVNIEDPGETPKHQPGSPRGSGREEDDELLGNDDSDKTEGTVSGNDSSEVNDTWPLPWWGKQANRPLLSLLAGQKKSSPFWTFEYYQTFFDVDTYQVFDRIKGSLLPIPGKNFVRLYIRSIV

SEQ ID NO: 10610 - protein, 119 aa, Homo sapiens
MTCNLKLLAGQKKSSPFWTFEYYQTFFDVDTYQVFDRIKGSLLPIPGKNFVRLYIRSNPDLYGPFWICATLVFAIAISGNLSNFLIHLGEKTYHYVPEFRKVSIAATIIYAYAWLVPLA

SEQ ID NO: 10611 - protein, 61 aa, Homo sapiens
SIIFLPTLSSTFSIKIRLKPQDLGNWWQQTALVLGVISLNIHEYPFLQCSSFLSGWGRALS

SEQ ID NO: 10612 - protein, 106 aa, Homo sapiens
ARGVYGYSLFIYIPTAILWIIPHKAVRWILVQIALGISGSLLAMTFWPAVREDNRRVALATIVTIVLLHMLLSVGCLACFFDAPEMDHLPTTTGTPNQTVAAAKSS

SEQ ID NO: 10613 - protein, 363 aa, Homo sapiens
PLARLNCLCSSLSPSPLSNLSLSFLIGTSLGCTCSLKHSHKPCQIFFLIIGRRLTGRMAAVDDLQFEEFGNAATSLTANPDATTVNIEDPGETPKHQPGSPRGSGREEDDELLGNDDSDKTELLAGQKKSSPFWTFEYYQTFFDVDTYQVFDRIKGSLLPIPGKNFVRLYIRSNPDLYGPFWICATLVFAIAISGNLSNFLIHLGEKTYHYVPEFRKVSIAATIIYAYAWLVPLALWGFLMWRNSKVMNIVSYSFLEIVCVYGYSLFIYIPTAILWIIPQKAVRWILVMIALGISGSLLAMTFWPAVREDNRRVALALIVTIVLLHMLLSVGCLAYFFDAPEMDHLPTTTATPNQTVAAAKSS

SEQ ID NO: 10614 - protein, 149 aa, Homo sapiens
LDSSHCCSCSTALFRTQTTAAAVPRMVIRVYIASSSGSTAIRGKRQQDVLGFLEANKIGFGRKDIAANGENRKWMRENVPENSRPGTGYPLPPQIFNESQYRGDYDAFFGRPEENNAVYCLLRGLTAPPGVSKGRQEGAKPKAGQALTL

SEQ ID NO: 10615 - protein, 76 aa, Homo sapiens
  misc_feature (1)...(76): Xaa = X or * as defined in Table 2
GRLFPKVLSYHSVGYLPLILFCHFLLANCILCCLMHFLXFFQSYRFXGXKFGFTQHHCHYIFHKQWPLLWKNFPEH

SEQ ID NO: 10616 - protein, 115 aa, Homo sapiens
QNCLKPHFFFFFETRVSLLLPKREAMGTISTHCNLCLPGFQGNSPASASQGRLAGLHGMGPPCRRGTFVFLIGDRGFLHVGSSWSWNSQPQVIRPPRPSPKCWGLQGMEATVPSP

SEQ ID NO: 10617 - protein, 150 aa, Homo sapiens
PLLPPALPGCHALAPSSYIPVAIRALEPPSPYHGQLKMQSIPGPPQPRSFFLSSPLDVDSPQAPRHCTGLPAPSLSSPPWSCPTLFSWFFEASGVCHHWTSVIAASNSSPIFPELPHPHPLRISAWLFPPWRDHSQDPLCRGATSPVLNS

SEQ ID NO: 10618 - protein, 229 aa, Homo sapiens
  misc_feature (1)...(229): Xaa = X or * as defined in Table 2
AWGSGKQQRRQEAQCEVAEFTPAWRRAPDTPAPLVLEPARAXHTSPKKHPPMWCRFFFFRQSFALVPQIGVQWRNLGSLQPLPPRFKAFSYPQPPPSSWHYRHVPIFVFSANFCIFNKRWGFTMLAKLVLNSXPHEIHPPGPSQSAGIMGVSHCTWLVFSFKVVLVDYFFEKFPNXGNRFEFYFYLFETGSHSVNQAGVQRPYHASLQPQPPQAQVSLPSSWDYRHVPF

SEQ ID NO: 10619 - protein, 112 aa, Homo sapiens
  misc_feature (1)...(112): Xaa = X or * as defined in Table 2
PRLISKCFLLLLFFRQSHFVAQAGVQWCDLRSVYHLPPGLKRFSCLSLPSSWDYRHLPPCPANFCNFSRDRVSPCCPGWFRTPDPGDPPASASPKWWEYTLXPPGPDHPKAF

SEQ ID NO: 10620 - protein, 78 aa, Homo sapiens
  misc_feature (1)...(78): Xaa = X or * as defined in Table 2
VLSVGLPTGDTGIGLSRKTSPAPVALIHSHSLKQAHPXLTLGSRTGNIHAIYYRGVLKYCNFICLGFMLRYQLVSPSF

SEQ ID NO: 10621 - protein, 355 aa, Homo sapiens
  DOMAIN (124)..(146): Chromo domain proteins domain identified by eMATRIX, accession number BL00598, p-value=6.625e-16, raw score of 14.45
MGSVPLIKRPKRASLSLPPHEVSNANDDDPLESEKFNPNKLTYILAVHSTALGNSPLALPLKPPILPAVKCTRIVVVMCISPMANDVERLSVCFTGHLCIFFGEMSIQVERIVDKRKNKKGKTEYLVRWKGYDSEDDTWEPEQHLVNCEEYIHDFNRRHTEKQKESTLTRTNRTSPNNARKQISRSTNSNFSKTSPKALVIGKDHESKNSQLFAASQKFRKNTAPSLSSRKNMDLAKSGIKILVPKSPVKSRTAVDGFQSESPEKLDPVEQGQEDTVAPEVAAEKPVGALLGPGAERARMGSRPRIHPLVPQVPGPVTAAMATGLAVNGKGECLGSCSGSVVIPEGSGPSLEIRP

SEQ ID NO: 10622 - protein, 613 aa, Homo sapiens
  DOMAIN (92)..(114): Chromo domain proteins domain identified by eMATRIX, accession number BL00598, p-value=6.625e-16, raw score of 14.45
AGGNQRTQSPRKNFMAFQASHRPAWGKSRKKNWQYEGPTQKLFLKRNNVSAPDGPSDPSISASSEQSGAQQPPGLQVERIVDKRKNKKGKTEYLVRWKGYDSEDDTWEPEQHLVNCEEYIHDFNRRHTEKQKESTLTRTNRTSPNNARKQISRSTNSNFSKTSPKALVIGKDHESKNSQLFAASQKFRKNTAPSLSSRKNMDLAKSGIKILVPKSPVKSRTAVDGFQSESPEKLDPVEQGQEDTVAPEVAAEKPVGALLGPGAERARMGSRPRIHPLVPQVPGPVTAAMATGLAVNGKGTSPFMDALTANGTTNIQTSVTGVTASKRKFIDDRRDQPFDKRLRFSVRQTESAYRYRDIVVRKQDGFTHILLSTKSSENNSLNPEVLREVQSALSTAAANDSKVVLPRAVGSVFCCGLNFNYFKPRLPNARKRESIKMAEAIRNFVNTFIQFKKPIIVAVNGPAIGLGASILPLCDVVWANEKAWFQTPYTTFGQSQEGCSPVMFPKIMGGSICILDAVLGDRNLTAQEACGKGLVSRVFWPGTSPRKVMVRIKELASCNPVVLEESKALVRCNMKMELEQANERECEVLKKIWGSAQGDGTRMLKVLCRGKIE

SEQ ID NO: 10623 - protein, 190 aa, Homo sapiens
  misc_feature (1)...(190): Xaa = X or * as defined in Table 2
WCLQHDLGHASIFKKSWWNHVAQKFVMGQLKGFSAHWWNFRHFQHHAKPNIFHKDPDVTVAPVFLLGESSVEYGKKKRRYLPYNQQHLYFFLIGPPLLTLVNFEVENLAYMLVCMQWAVSGVAQDPGHTAAVAGGGASGDSTCPXRQTGCTDLLWAASFYARFFLSYLPFYGVPGVLLFFVAVRYGREWR

SEQ ID NO: 10624 - protein, 135 aa, Homo sapiens
  misc_feature (1)...(135): Xaa = X or * as defined in Table 2
YKNNSFPPILALGKCAMLTFPLPLSHQAQSQGHRAAEYTCEGRSPFPVGSLPWGQAAMRAGGWVGRTAECSFSGMESRPGXRVSGRGAGGQPRPSPGMSLGGPVPPAPSSPLLPPAGRCNPRTERTWNLPTRSWA

SEQ ID NO: 10625 - protein, 195 aa, Homo sapiens
GSARASPQGPGKPLVRVDHTDEPHPQGDRPREAPGLGQLSAGSHLQRGALTFHQLVQRAPQLPDRAPPLPQDAETQLQPGCPACQVAVCQARPQLRSEALPHRAGGHRQVPEESLVTSCWTPTSISEGNTQAGREGLRAPATKPSPRRDRIPPTPPLTSLGVPCLPSWYCCLPLGPLTCVFSSPMALALGLMGQG

SEQ ID NO: 10626 - protein, 191 aa, Homo sapiens
  DOMAIN (40)..(79): Glyoxalase I proteins domain identified by eMATRIX, accession number BL00934A, p-value=7.231e-38, raw score of 19.08
VLQCSHGCFSQPSSGGLTDEAASSCCSDADPSTKDFLLQQTMLRVKDPKKSLDFYTRVLGMTLIQKCDFPIMKFSLYFLAYEDKNDIPKEKDEKIAWAVSRKATLELTQQFGALKDDATQSYHNGNSDPRGFGHIGIAVPDVYSACKRFEELGVKFVKKPDDGKMKGLAFIQDPDGYWIEILNPNKMATLM

SEQ ID NO: 10627 - protein, 108 aa, Homo sapiens
  DOMAIN (65)..(79): Regulator of G protein signalling domain proteins domain identified by eMATRIX, accession number PF00615C, p-value=4.441e- 12, raw score of 10.06
CSIRCSFQCPACRWPSLSHAHPLPQLTLCVSSFPQVNIDHETRELTRMNLQTATATCFDAAQGKTRTLMERDSYPRFLKSPAYRDLAAQASAASATLSSCSLDEPSHT

SEQ ID NO: 10628 - protein, 242 aa, Homo sapiens
  DOMAIN (121)..(138): Regulator of G protein signalling domain proteins domain identified by eMATRIX, accession number PF00615B, p-value=9.625e- 16, raw score of 16.25
TQPQLTSTCYRAFASWRTRSLLEPATILPTTCCPAPAAMCRTLAAFPTTCLERAKEFKTLLGIFPHKSELGFDTGSTGKFEWGSKHSKGDLKTSQKDVLGWRESFDLLLSSKNGVAAFHAFLKTEFSEENLEFWLACEEFKKIRSATKLASRAHQIFEEFICSEAPKEVNIDHETRELTRMNLQTATATCFDAAQGKTRTLMEKDSPYPRFLKSPAYRDLAAQASAASATLSSCSLDEPSHT

SEQ ID NO: 10629 - protein, 258 aa, Homo sapiens
  misc_feature (1)...(258): Xaa = X or * as defined in Table 2
RSLALSPRLECNGAISAHCKLRLPGSRHSPASASRAAGTTGAHHRARLIFFVFLVETGFHRVSQDGLELPDLDDPPASASQSAGITGVTAAPSRACSFKLARGRACPGWDWAEELTGTSHTRRVHPGQALWGWDWRRCSCGSRSWQTXLQRCPAVLRGWLACLTAQEEQIGPYVSVSPPVIPGAACCFIDVLRXKISDKDVFKAGRGAQPKTFSFLLRKSLNPVTQARVQWCDLSSLQLLPPRFKXFSCFSLPSRTIT

SEQ ID NO: 10630 - protein, 94 aa, Homo sapiens
  DOMAIN (20)..(48): !!!! PROTEIN ALU SUBFAMILY WARNING ENTRY NUCLEAR PHOSPHO domain identified by eMATRIX, accession number PD02454B, p-value= 7.779e-14, raw score of 11.61
  misc_feature (1)...(94): Xaa = X or * as defined in Table 2
LMPCNPRHFERLRQADHLRSGVPRPALVQHGETLSVLKIQKLGGHGSTCLXSQLLRRLRQKNLLSLGGRGCSKLRSHHCTPAWVTEPDSVSKKK

SEQ ID NO: 10631 - protein, 105 aa, Homo sapiens
  DOMAIN (77)..(96): SMALL CXC CYTOKINE FAMILY SIGNATURE domain identified by eMATRIX, accession number PR00437C, p-value=4.130e-18, raw score of 14.85
PGSTHASADAWVHPKNISSVNALSPGPHCAQTEVIVSPAPRCLCHRRGPRPSCCPNPVPSLTSCLTRFPSLCRATLKNGRKACLNPASPIVKKIIEKMLNSDKSN

SEQ ID NO: 10632 - protein, 90 aa, Homo sapiens
  DOMAIN (38)..(86): Small cytokines (intercrine/chemokine) C-x-C subfamily signat domain identified by eMATRIX, accession number BL00471, p-value= 1.761e-11, raw score of 23.92
MARATLSAAPSNPRLLRVALLLLLLVAASRRAAGASVVTELRCQCLQTLQGIHLKNIQSVNATLKNGKKACLNPASPMVQKIIEKILNNP

SEQ ID NO: 10633 - protein, 297 aa, Homo sapiens
  DOMAIN (208)..(256): Small cytokines (intercrine/chemokine) C-x-C subfamily signat domain identified by eMATRIX, accession number BL00471, p-value= 2.141e-11, raw score of 23.92
  misc_feature (1)...(297): Xaa = X or * as defined in Table 2
MSSREVTPPGKDVARSLRGSKGSDPRRTALGSRSASSQAVISVSLRAAGSRSRSRDSGQKENIPQLAGVTQDSQTRTSLVSAPTPLHPRGGAIAFLPNSGSIWSSGNFPGPGLRAFQPQPCIKGVRRSRRATEPGPQAAPCQLSSSHSRSNRLLSPMARATLSAAPSNPRLLRVALLLLLLVAASRRAAGAPLATELRCQCLQTLQGIHLKNIQSVKVKSPGPHCAQTEVMXVSPIAAAATAGVPDSPAAPNPVLSPTSCLTRFPSLCRATLKNGQKACLNPASPMVKKIIEKMLKK

SEQ ID NO: 10634 - protein, 135 aa, Homo sapiens
  DOMAIN (79)..(127): Small cytokines (intercrine/chemokine) C-x-C subfamily signat domain identified by eMATRIX, accession number BL00471, p-value= 7.632e-16, raw score of 23.92
ATEPGPQAPPRQLFRSSHSRQTRLLSPMARAALSAAPSNPRLLRVALLLLLLVAAGRRAAGASVATELRCQCLQTLQGIHPKNIQSVNVKSPGPHCAQNEVHKHTQEMGGKACLNPASPIIKKIIEKMLNSDKSN

SEQ ID NO: 10635 - protein, 278 aa, Homo sapiens
KQPFEVWPAGGERLSGARPKKEARLLRWCPMSFKRNRSDRFYSTRCCGCCHVRTGTIILGTWYMVVNLLMAILLTVEVTHPNSMPAVNIQYEVIGNYYSSERMADNACVFFFAVSVLKVYNPVPMLVYGSNFLYPSGVGWIPFFCYRLFDFVLSCLVAISSLTYLPRIKEYLDQLPDFPDKDDLRALDSSCLLFIVLVFFALFIIFKAYLINCVWNCYKYINNRNVCPEIAVYPAFEAPPQYVLPTYEMGREKWPEKEPHPPLLTWPEGNSGLWTINP

SEQ ID NO: 10636 - protein, 105 aa, Homo sapiens
MPVAVMAESAFSFKKLLDQCENQELEAPGGIATPPVYGQLLALYLLHNGQRIWQRDFPGIYTTINAHQWSETVQPIMEALRDATRRRAFALVSQAYTSIIADDFA

SEQ ID NO: 10637 - protein, 82 aa, Homo sapiens
IIADDFAAFVGLPVEEAVKGILEQGWQADSTTRMVLPRKPVAGALDVSFNKFIPLSEPAPVPPIPNEQQLARLTDYVAFLEN

SEQ ID NO: 10638 - protein, 72 aa, Homo sapiens
RGSGRGEKKKGCSGAAPGYLPWRHRGRGPWRMAFLLATCGGLDSGFVPSVQDFDKKLTEADAYLQILIEQLK

SEQ ID NO: 10639 - protein, 39 aa, Homo sapiens
LKNSVKYLLNKCRVNELRAVITLSYNKQLQIFRGLSHRE

SEQ ID NO: 10640 - protein, 237 aa, Homo sapiens
GTVWGLAVRTVQRRGPAAKMPVAVMAESAFSFKKLLDQCENQELEAPGGIATPKVYGQLLALYLLHNDMNNARYLWKRIPPAIKSANSELGGIWSVGQRIWQRDFPGIYTTINAHQWSETVQPIYGKHFRDATRRDRAFAPGLLQAVYFQSIRPMIFAAFVGLPVEEAVKGILEQGWQADSTTRNGSCPGKPVCRGPWDVFPFNKFISLYSEPAPVPPIPNEQQLARLTDYVAFLEN

SEQ ID NO: 10641 - protein, 117 aa, Homo sapiens
HEVYSGGDDGLLRGWDTRVPGKFLFTSKSYDEHILLWDTRNMKQPLADTPVQGGVWRIKWHPFHHHLLLAACMHSGFKILNCQKAMEERQEATVLTSHTLPDSLVYGADWSWLLFRS

SEQ ID NO: 10642 - protein, 59 aa, Homo sapiens
SSVVEFGACTGISTASRSARMAWGCEREGDHAPRSSLWESCPASVRSVSSSVPRSSRGP

SEQ ID NO: 10643 - protein, 107 aa, Homo sapiens
  misc_feature (1)...(107): Xaa = X or * as defined in Table 2
LRTLISCHLVVLMLLFLHTGGDDGLLRGWDTRVPGKFLFTSKRXPPKGQHSVPTPAPAFPGSPALPFPGWVCVLDTGSEAASACRHTMGVCSIQSSPHREHILATGR

SEQ ID NO: 10644 - protein, 49 aa, Homo sapiens
GLANTPGQGGVWRIKGHPFHHHLLLAACMHSGFKILNCQKAMGCGSLRA

SEQ ID NO: 10645 - protein, 235 aa, Homo sapiens
KSHVLEPLSSLALEEQCLALSLDWSTGKTGRAGDQPLKIISSDSTGQLHLLMVNETRPRLQKVASWQAHQFEAWTCCFQLPWHPEIVYSGGDDGLLRGWDTRVPGTFLFTSIKTHHGCVASIQSKPSSGAHPWPRESYDETHPTVDTRNMKQPLADTPVQGGVWRIKWHPFHHHLLLAACMHSGFKILNCQKAMEERQEATVLTSHTLPDSLVYGADWSWLLFRSLQRAPLVVLS

SEQ ID NO: 10646 - protein, 32 aa, Homo sapiens
PIQAGLSLLKTAGKKGPEGSPPVFYSPLNPGA

SEQ ID NO: 10647 - protein, 116 aa, Homo sapiens
RLWASPAAPGKKKEMGNSMKSTPAPAERPLPNPEGLDSDFLAVLSDYPSPDINPPIFRRGEKLRVISDERGWWKAISLSTGRESYIPAICVARSYHGWLLRGPGKNMAEELLQLPD

SEQ ID NO: 10648 - protein, 315 aa, Homo sapiens
  DOMAIN (188)..(203): SH2 DOMAIN SIGNATURE domain identified by eMATRIX, accession number PR00401E, p-value=1.000e-09, raw score of 14.10
  DOMAIN (126)..(206): Src homology domain 2 domain identified by PFam, accession name SH2, E-value=6.2e-19, PFam score of 58.2
KAATSENKIICCEWRTSQAALMLHRLWASPAAPGKKKEMGNSMKSTPAPAERPLPNPEGLDSDFLAVLSDYPSPDISPPIFRRGEKLRVISDEGGWWKAISLSTGRESYIPGICVARVYHGLWLFEGLGRDKAEELLQLPDTKVGSFMIRESETKKGFYSLSVRHRQVKTYRIFRLPNNWYYISPRLTFQCLEDLVNHYSEVADGLCCVLTTPCLTQSTAAPAVRACSSPVTLRQKTVDWRRVSRLQEDPEGTENPLGVVESLFSYGLRESIASYLSLTSEDISSFDRKKKSISLMYGGSKRKSSFFSSPPYFED

SEQ ID NO: 10649 - protein, 553 aa, Homo sapiens
  DOMAIN (305)..(341): Oxysterol-binding protein family proteins domain identified by eMATRIX, accession number BL01013A, p-value=4.600e-14, raw score of 25.14
  DOMAIN (264)..(553): Oxysterol-binding protein domain identified by PFam, accession name Oxysterol_BP, E-value=5.4e-05, PFam score of -80.3
  misc_feature (1)...(553): Xaa = X or * as defined in Table 2
VPGVPAARPERECRAHPASFPPPPGGLDSGFVPSVQDFDKKLTEADAYLQILIEQLKLFXXQASKRKEDEQRKKIETLKETTNSMVESIKHCIVLLQIAKDQSNAEKHADGMISTIKSCRCNIPAXSLGTCDQAQCLPRLPYLQNPLSCVSQSSVHLSXQVGPVLSYLGTSSDSNTQIVPGSGNFTNLAASLTPSQAMSTLSPNTVPEFSYSRQXEDEFYDADENSIKVGSSPKRLIDSSGSASVLTHSSSGNSLKRPDTTESLNSSLSNGTSDADLFDSHDDRDDDAEAGSVEEHKSVIMHLLSQVRLGMDLTKVVLPTFILERRSLLEMYADFFAHPDLFVSISDQKDPKDRMVQVVKWYLSAFHAGRKGSVAKKPYNPILGEIFQCHWTLPNDTEENKELVSEGPVPGVSKNSVTFVAEQVSHHPPIFSLFMLECFNKKIQFNAHIWTKSKFLGMSIGVHNIGQGCVSCLDYDEHYILTFPNGYGRSILTVPWVELGGECNINCSKTGYSANIIFHTKPFYGGKKHRITAEIFSPNDKKSFCSIEGEWNG

SEQ ID NO: 10650 - protein, 218 aa, Homo sapiens
  DOMAIN (33)..(74): Ribosomal protein L18e proteins domain identified by eMATRIX, accession number BL01106A, p-value=6.045e-14, raw score of 18.93
  DOMAIN (11)..(208): Eukaryotic ribosomal protein L18 domain identified by PFam, accession name Ribosomal_L18e, E-value=6.1e-41, PFam score of 149.4
VDHPPYKRTEKVRAQRSPKSQDIYLGLLVKLYRFSGPEEPNSNIQTRVVLKRLFMSRTNRPPLSLSRMIREDEAFLAGKKKNPAVVVGPQKLIMCGVQKGTPKLKVCALGGTQAGPHKRILRARGQRSITFDQLALDSPLRGCGTVLLSGPSKGREVYRHFGKAPGNPHSHTKPYVRSKGRKFERARGRRASRGYKKLTLDPTLLYKKIFADSEKKKK

SEQ ID NO: 10651 - protein, 65 aa, Homo sapiens
PGVAGARHPLLGAAPKGRLEVLAGVFHGSAANQVWVSKSHPQFIPTDQEIGGDRALKGTCRLPLS

SEQ ID NO: 10652 - protein, 126 aa, Homo sapiens
AHSRTPARPENRAAASAPRKPRRAMSSPPEGKLETKAGHPPAVKAGGMRIVQKHPHTGDTKEEKDKDDQEWESPSPPKPTVFISGVIARGDKDFPPAAAQVAHQKPHASMDKHPSPRTQHIQQPRK

SEQ ID NO: 10653 - protein, 321 aa, Homo sapiens
  DOMAIN (212)..(243): Adenylate kinase proteins domain identified by eMATRIX, accession number BL00113D, p-value=1.000e-21, raw score of 24.41
  DOMAIN (89)..(283): Adenylate kinase domain identified by PFam, accession name adenylatekinase, E-value=4.3e-53, PFam score of 189.8
GTRVGVAWRSVRLLLGPGAGLRGGVVLKVSPSPCRGGRRVPVRAEGARGRGPRNKVPGASSGAAVGAARLTAPLLAKAMASKLLRAVILGPPGLGKGAPVCQRIAQNFGLQHLSSGHFLRENIKASTEVGEMANQVYREKVFLVPDHVITRLMMSELENRRGQHWLLDGFPRTLGQAEALDKICEVDLVISLNIPFETLKDGLNRRWIHPPSGRVYNLDFNPPHVHGIDDVTGEPLVQQEDDKPEAVAARLRQYKDVAKPVIELYKSRGVLHQFSGTETNKMWPYVYTLFSNKITPIQSKESILTLAQWEEPWNDVGHSFQ

SEQ ID NO: 10654 - protein, 142 aa, Homo sapiens
LYFRRRKFQLCADLCTQMLEKSPYDQAAWILKARALTEMVYIDEIDVDQEGIAEMMLDENAIAQVPRPGTSLKLPGTNQTGGPSQAVRPITQAGRPITGFLRPSTQSGRPGTMEQAIRTPRTAYTARPITSSSGRFVRLGTA

SEQ ID NO: 10655 - protein, 207 aa, Homo sapiens
  misc_feature (1)...(207): Xaa = X or * as defined in Table 2
QAAWILKARALTEMVYIDEIDVDQEGIAEMMLDENAIAQVPRPGTSLKLPGTNQTGGPSQAVRPTSHSEKPITGFLRPSTQSGRPGTMEQAIRTPRTAYTARPITSSSGRFVRLGTASMLTSPDGPFINXSRLNLTKYSQKPKMAKALPEYIFHHENDVKTALELAALSTEHSQYKDWWWKVQIEKRYYRLGMYREAEKQLISAMKQ

SEQ ID NO: 10656 - protein, 503 aa, Homo sapiens
  DOMAIN (292)..(464): TPR Domain domain identified by PFam, accession name TPR, E- value=1.2e-19, PFam score of 78.7
MKAEICKSRTVKDWHNHQKLGEGNKTDSPPQPSEGTNTANTLILDFWPLEMIACCWETFPQRLTAELFMNPTHRWHGYKNQSVGALRAPLGQGPSRRGLPGRVGRRQLFTPRPPLSWSAGPSLAAPAAMSSEMEPLLLAWSYFRRRKFQLCADLCTQMLEKSPYDQEPDPELPVHQAAWILKARALTEMVYIDEIDVDQEGIAEMMLDENAIAPSSTPITQAGRPITGFLRPSTQSGRPGTMEQAIRTPRTAYTARPITSSSGRFVRLGTLGMYREAEKQFKSALKQQEMVDTFLYLAKVYVSLDQPVTALNLFKQGLDKFPGEVTLLCGIARIYEEMNNMSSAAEYYKEVLKQDNTHVEAIACIGSNHFYSDQPEIALRFYRRLLQMGIYNGQLFNNLGLCCFYAQQYDMTLTSFERALSLAENEEEAADVWYNLGHVAVGIGDTNLAHQCFRLALVNNNNHAEAYNNLAVLGDAEGRHVEQARALLQTASSISPHMYEPHF

SEQ ID NO: 10657 - protein, 240 aa, Homo sapiens
  DOMAIN (182)..(195): PROTEIN ZINC-FINGER METAL-BINDI domain identified by eMATRIX, accession number PD00066, p-value=2.800e-14, raw score of 13.92
  DOMAIN (169)..(220): Zinc finger, C2H2 type domain identified by PFam, accession name zf-C2H2, E-value=8.1e-13, PFam score of 56.0
  misc_feature (1)...(240): Xaa = X or * as defined in Table 2
STCCFQELVTLXGCKLCTFHPGRKWETRLEPLPQRDPSYRVVMLGELRGIVFLTGIVSPRTENDQEISEDTRSHGVLLGRFQKDISQGLKFKEAYEREVSLKRPLGNSPGERLNRKMPDFGQVTVERSXPPGEREARKYNDFGNSFTVNSNLISHQRLPVGDTRPHKCDECSKSFNRTSDLIQHQRIHTGEKPYECNECGKAFSQSSHLIQHQRIHTGEKPYECSDWGKTFSCSSDLILH

SEQ ID NO: 10658 - protein, 58 aa, Homo sapiens
  DOMAIN (26)..(37): SH2 DOMAIN SIGNATURE domain identified by eMATRIX, accession number PR00401B, p-value=3.000e-09, raw score of 12.94
  DOMAIN (7)..(46): Src homology domain 2 domain identified by PFam, accession name SH2, E-value=5.2e-12, PFam score of 38.3
MDAVAVYHGKISRETGEKLLLATGLDGSYLLRDSESVPGVYCLCVLQHLGYIKDISGK

SEQ ID NO: 10659 - protein, 62 aa, Homo sapiens
  DOMAIN (26)..(37): SH2 DOMAIN SIGNATURE domain identified by eMATRIX, accession number PR00401B, p-value=3.000e-09, raw score of 12.94
  DOMAIN (7)..(46): Src homology domain 2 domain identified by PFam, accession name SH2, E-value=5.2e-12, PFam score of 38.3
MDAVAVYHGKISRETGEKLLLATGLDGSYLLRDSESVPGVYCLCVLFQKPDQGIVIPLQYPV

SEQ ID NO: 10660 - protein, 76 aa, Homo sapiens
  DOMAIN (33)..(44): SH2 DOMAIN SIGNATURE domain identified by eMATRIX, accession number PR00401B, p-value=3.000e-09, raw score of 12.94
  DOMAIN (14)..(53): Src homology domain 2 domain identified by PFam, accession name SH2, E-value=5.2e-12, PFam score of 38.3
  misc_feature (1)...(76): Xaa = X or * as defined in Table 2
CPRVHQAMDAVAVYHGKISRETGEKLLLATGLDGSYLLRDSESVPGVYCLCVLXVXYVCCEYDTVDPCLWYLVMAA

SEQ ID NO: 10661 - protein, 128 aa, Homo sapiens
  DOMAIN (44)..(55): SH2 DOMAIN SIGNATURE domain identified by eMATRIX, accession number PR00401B, p-value=3.000e-09, raw score of 12.94
  DOMAIN (25)..(80): Src homology domain 2 domain identified by PFam, accession name SH2, E-value=3.1e-14, PFam score of 44.7
GISLAQFSSSACPRVHQAMDAVAVYHGKISRETGEKLLLATGLDGSYLLRDSESVPGVYCLCVLYHGYIYTYRVSQTETGSWSAEAFQKPDQGIVIPLQYPVEKKSSARSTQGTTGIREDPDVCLKAP

SEQ ID NO: 10662 - protein, 173 aa, Homo sapiens
  DOMAIN (52)..(63): SH2 DOMAIN SIGNATURE domain identified by eMATRIX, accession number PR00401B, p-value=3.000e-09, raw score of 12.94
  DOMAIN (34)..(74): Src homology domain 2 domain identified by PFam, accession name SH2, E-value=2.8e-12, PFam score of 39.0
LVPGCSSSGISLAQFSSSACPRVHQAMDAVAVYHGKISRETGEKLLLATGLDGSYLLRDSESVPGVYCLCVLYHGYIYTYRVSQTETGSWSAETAPGVHKRYFRKMKKSHFQHFQKQDQGIVIPLQYPVEKKSSARSTQGTTGIREDPEVCLNAPLIKISPLRPLFSITFNIC

SEQ ID NO: 10663 - protein, 65 aa, Homo sapiens
SIRAEMSRSVALAVLALLSLSGLEAIQRTPKIQVYITSSSREWKVKFPELLCVWVSSTPTLKLTY

SEQ ID NO: 10664 - protein, 90 aa, Homo sapiens
HLYPASRAGKGDLVSWQQGEPGLGWPQLSLQVRSPGPCSSCDLHGHGVLGKREVELVPLVEDAGDAHSEPRAPEDHRLQEAPHACQEVHS

SEQ ID NO: 10665 - protein, 39 aa, Homo sapiens
CSQEKSGDLRGCDVPPGPRHDLEHVCCGLDGAEGRSAGP

SEQ ID NO: 10666 - protein, 1115 aa, Homo sapiens
  DOMAIN (192)..(213): CALICIVIRUS NON-STRUCTURAL POLYPROTEIN FAMILY SIGNATURE domain identified by eMATRIX, accession number PR00918A, p-value= 4.923e-11, raw score of 13.76
MDQPEAPCSSTGPRLAVARELLLAALEELSQEQLKRFRHKLRDVGPDGRSIPWGRLERADAVDLAEQLAQFYGPEPALEVARKTLKRADARDVAAQLQERRLQRLGLGSGTLLSVSEYKKKYREHVLQLHARVKERNARSVKITKRFTKLLIAPESAAPEEALGPAEEPEPGRARRSDTHTFNRLFRRDEEGRRPLTVVLQGPAGIGKTMAAKKILYDWAAGKLYQGQVDFAFFMPCGELLERPGTRSLADLILDQCPDRGAPVPQMLAQPQRLLFILDGADELPALGGPEAAPCTDPFEAASGARVLGGLLSKALLPTALLLVTTRAAAPGRLQGRLCSPQCAEVRGFSDKDKKKYFYKFFRDERRAERAYRFVKENETLFALCFVPFVCWIVCTVLRQQLELGRDLSRTSKTTTSVYLLFITSVLSSAPVADGPRLQGDLRNLCRLAREGVLGRRAQFAEKELEQLELRGSKVQTLFLSKKELPGVLETEVTYQFIDQSFQEFLAALSYLLEDGGVPRTAAGGVGTLLRGDAQPHSHLVLTTRFLFGLLSAERMRDIERHFGCMVSERVKQEALRWVQGQGQGCPGVAPEVTEGAKGLEDTEEPEEEEEGEEPNYPLELLYCLYETQEDAFVRQALCRFPELALQRVRFCRMDVAVLSYCVRCCPAGQALRLISCRLVAAQEKKKKSLGKRLQARLGGGSWLGTQLAPEVPFRPPCCDICPTPPPDPRLLQGKAFARVPLNIAPIQPLPRGLASVERMNVTVLAGAGPGDPKTHAMTDPLCHLSSLTLSHCKLPDAVCRDLSEALRAAPALTELGLLHNRLSEAGLRMLSEGLAWPQCRVQTVRVQLPDPQRGLQYLVGMLRQSPALTTLDLSGCQLPAPMVTYLCAVLQHQGCGLQTLSLSLPSDPTPSSFSGRCREPGRRLGLESRWPRSAPEPSGRQRGEDPGGGGRGRGRREEAREGTPGPRAPPTAAPGRSSGSRLELCSLRALRAGNARPPDATHAAAASGDRGEPGPRPRVHVPPPGPAQRPPPPPRDRPRLPATARALGAGTADLPGGAAAGRLLLPPGPGVEQRDTGSHAGARRPGGAAAAQAQQLHGGRRRGPHHVCCPLSAQ

SEQ ID NO: 10667 - protein, 103 aa, Homo sapiens
  misc_feature (1)...(103): Xaa = X or * as defined in Table 2
KGGSLLGAPRVEGPNFGLKDSSSPKKREFPALPPPGGGNKRAGPPCPGKFGFLKKKGVPPGGKRGLNPRPQGDSSSXPPKGGGITGGAPRPGKKRSFSLQKIL

SEQ ID NO: 10668 - protein, 85 aa, Homo sapiens
AIHLYPEILPLGNEKSTTGDGRPELDNLSDEYLSCLRKLQHCREELNQSQQLPPRRQCGRWLPVLMVVIAAALAVFLANKDNLMI

SEQ ID NO: 10669 - protein, 142 aa, Homo sapiens
DAWADAWADAWALRIQQREQLQRARLQQFFRRRNLELEEKGKAQHPQAREQGPSRRPGQVTVLKEPLSCARRISSPREQVTGTSSEVFPAQHPPPSGICRDLSDHLSSQAGGLPPQDTPIKKPPKHHRGTQTKAEGPTIKND

SEQ ID NO: 10670 - protein, 287 aa, Homo sapiens
  misc_feature (1)...(287): Xaa = X or * as defined in Table 2
ALGKQKCEEWRSKYEALKEDWRNLGAQHRELESQLHVLQSKLQGADSRDLQMNQALRSLQNEHQQLQAKIECLQADRDLCSLYTQDLQDQLKRSEAEKLTLVTRVQQLQGLLQNQSLQLQEQEKLLTKKRSANLLPQILRYCSFSYLPRGSGMDYMTSWSPSQFWEFCXVRDVWELFKDXSLALRTLQLVSLLSXDQALPVWSPKSFPNEVEPEGTGKEKDWDLRDQLQKKTLQLQAKEKECRELHSELDNLSDEYLSCLRKLQHCREELNQSQQLPPRRQCGRWLP

SEQ ID NO: 10671 - protein, 541 aa, Homo sapiens
AKRNRCLEVIMISPDPRPSPGLARGAESYEAKCERRQEIRESRRCRPNVTTCRQVGKTLRIQQREQLQRARLQQFFRRRNLELEEKGKAQHPQAREQGPSRRPGQVTGTSSEVFPAQHPPPSGICRDLSDHLSSQAGGLPPQDTPIKKPPKHHRGTQTKAEGPTIKNDASQQTNYGVAVLDKEIIQLSDYLKEALQRELVLKQKMVILQDLLSTLIQASDSSWKGQLNEDKLKGKLRSLENQLYTCTQKYSPWGMKKVLLEMEDQKNSYEQKAKESLQKVLEEKMNAEQQLQSTQRSLALAEQKCEEWRSQYEALKEDWRTLGTQHRELESQLHVLQSKLQGADSRDLQMNQALRFLENEHQQLQAKIECLQGDRDLCSLDTQDLQDQLKRSEAEKLTLVTRVQQLQGLLQNQSLQLQEQEKLLTKKDQALPVWSPKSFPNEVEPEGTGKEKDWDLRDQLQKKTLQLQAKEKECRELHSELDNLSDEYLSCLRKLQHCREELNQSQQLPPRRQCGKGLPVLMVVIAPALAVFLANKNNLMI

SEQ ID NO: 10672 - protein, 61 aa, Homo sapiens
DTEVKPQSALPQASALTIWVSYQQGVLSATILYEILLGKATLYAVLVSALVLMAMVKRKDF

SEQ ID NO: 10673 - protein, 62 aa, Homo sapiens
GRPEPPVHRCLHALFLSTESYQAGVLSATILYEILLGKATLYAALVSALVLMAMVKRKDSRG

SEQ ID NO: 10674 - protein, 320 aa, Homo sapiens
  DOMAIN (171)..(194): Immunoglobulins and major histocompatibility complex proteins domain identified by eMATRIX, accession number BL00290A, p-value= 1.818e-11, raw score of 20.89
  DOMAIN (45)..(244): Immunoglobulin domain identified by PFam, accession name ig, E-value=1.2e-14, PFam score of 52.3
VKLPSCPDPAMGTSLLCWMALCLLGADHADTGVSQNPRHNITKRGQNVTFRCDPISEHNRLYWYRQTLGQGPEFLTYFQNEAQLEKSRLLSDRFSAERPKGSFSTLEIQRTEQGDSAMYLCASSLAGLNQPQHFGDGTRLSILEDLNKVFPPEVAVFEPSEAEISHTQKATLVCLATGFFPDHVELSWWVNGKEVHSGVSTDPQPLKEQPALNDSRYCLSSRLRVSATFWQNPRNHFRCQVQFYGLSENDEWTQDRAKPVTQIVSAEAWGRADCGFTSVSYQQGVLSATILYEILLGKATLYAVLVSALVLMAMVKRKDF

SEQ ID NO: 10675 - protein, 334 aa, Homo sapiens
  DOMAIN (51)..(254): Immunoglobulin domain identified by PFam, accession name ig, E-value=4.8e-13, PFam score of 47.1
GGIGEIKQRPSCLGRCLDPSLSVLMNISLELGSVFSAVISQKPSRDICHRGTSLTIQGQVDSQVTMMFWYRQQPGQSLTLIATANQGSEATYESGFVIDKFPISRPNLTFSTLTVSNMSPEDSSIYLCSVEEQGFVGGAETQYFGPGTRLLVLEDLKNVFPPEVAVLFEPSEAEISHTQKATLVCLAICFYLDHVELSWWVNGKEAHSGVSTDPQPLKEQPALNDSRYCLSSRLRVSATFWQNPRNHFRCQVQFYGLSENDEWTQDRAKPVTQIVSAEAWGRADCGFTSGKSYQQGVLSATILYEILLGKATLYAVLVSALVLMAMVKRKDSRG

SEQ ID NO: 10676 - protein, 45 aa, Homo sapiens
  DOMAIN (21)..(37): GAMMA G-PROTEIN (TRANSDUCIN) SIGNATURE domain identified by eMATRIX, accession number PR00321A, p-value=9.100e-18, raw score of 11.91
  DOMAIN (18)..(45): GGL domain identified by PFam, accession name G-gamma, E- value=1.6e-10, PFam score of 41.4
FLKDLSSTPMASNNTASIAQARKLVEQLKMEANIDRIKVSKAAAD

SEQ ID NO: 10677 - protein, 50 aa, Homo sapiens
  DOMAIN (23)..(39): GAMMA G-PROTEIN (TRANSDUCIN) SIGNATURE domain identified by eMATRIX, accession number PR00321A, p-value=9.100e-18, raw score of 11.91
  DOMAIN (20)..(50): GGL domain identified by PFam, accession name G-gamma, E- value=4.6e-12, PFam score of 46.7
GVFLKDLSSTPMASNNTASIAQARKLVEQLKMEANIDRIKVSKAAADLMA

SEQ ID NO: 10678 - protein, 149 aa, Homo sapiens
  misc_feature (1)...(149): Xaa = X or * as defined in Table 2
KPVILGYAEPPAPGQFSRGPWSRAEWPGTASPLLVSCATSALLXSIPKGPDSHRGHQHGTPKTPSKPEKGTAHGQLSRYITPQEKEIAPLNPPALKSPSKENRDPRDLTGPGQTSRALTVAPGCALGPQVEPMKALRRQMGGAVFPLGS

SEQ ID NO: 10679 - protein, 81 aa, Homo sapiens
  DOMAIN (20)..(68): G-protein gamma subunit profile domain identified by eMATRIX, accession number BL50058, p-value=7.480e-34, raw score of 27.23
  DOMAIN (16)..(81): GGL domain identified by PFam, accession name G-gamma, E- value=5.5e-18, PFam score of 67.0
RIYPALRMPSINTASIAQARKLVEQLFMFANIDRIKVSKAAADLMAYCEAHAKEDPLLTPVPASENPFKEKKFFCAHPLSL

SEQ ID NO: 10680 - protein, 80 aa, Homo sapiens
  misc_feature (1)...(80): Xaa = X or * as defined in Table 2
MFSLKKWNAVAMWSWDVECDTCAICRVQVMDEGIGVRNWSEALNLIYASEMGFDLDMGSQTSLSPLAHWLLNNLGWMNLX

SEQ ID NO: 10681 - protein, 200 aa, Homo sapiens
  DOMAIN (166)..(189): Zinc finger, C3HC4 type (RING finger) domain identified by PFam, accession name zf-C3HC4, E-value=0.069, PFam score of 10.3
  misc_feature (1)...(200): Xaa = X or * as defined in Table 2
ADVEDGEETCALASHSGSSGSKSGGDKMFSLKKWNAVAMWSWDVECDTCAICRVQVMDEGIGVRNWSEALNLINASEMGFDCRSGSTALAVPSVSLASHQPCLDDHRXQPIGSIQSSLFXRNSQVSXGRKXKVASYELLKEGFCVNACLRCQAENKQEDCVVVWGECNHSFHNCCMSLWVKQNNRCPLCQQDWVVQRIGK

SEQ ID NO: 10682 - protein, 141 aa, Homo sapiens
SGGSTEPLGLSAFPKPTSSAVGSVGAAMADVEDGEETCALASHSGSSGSKSGGDKMFSLKKWNAVAMWSWDVECDTCAICRVQVMDACFRCQAENKQEDFFVVLGECNHSFHNCCHVPCGSKQNNRCPLCQQDWVVQRIGK

SEQ ID NO: 10683 - protein, 124 aa, Homo sapiens
  DOMAIN (8)..(48): Ribosomal protein S21e proteins domain identified by eMATRIX, accession number BL00996A, p-value=1.000e-40, raw score of 15.12
  DOMAIN (8)..(86): Ribosomal protein S21e domain identified by PFam, accession name Ribosomal_S21e, E-value=1e-40, PFam score of 148.7
QAQPSLEMQNDAGEFVDLYVPRKCSASNRIIGAKDHASIQMNVAEVDKVTGRFNGQFKTYAICGAIRRMVSVSLGFAHHFGTSWTLPCALECVMVPEQICWQSSLSQLDWAGRLPLLEGGRGVL

SEQ ID NO: 10684 - protein, 98 aa, Homo sapiens
  DOMAIN (18)..(58): Ribosomal protein S21e proteins domain identified by eMATRIX, accession number BL00996A, p-value=1.000e-40, raw score of 15.12
  DOMAIN (18)..(98): Ribosomal protein S21e domain identified by PFam, accession name Ribosomal_S21e, E-value=9.5e-55, PFam score of 195.3
LLNSRPRRRQQAQPSLEMQNDAGEFVDLYVPRKCSASNRIIGAKDHASIQMNVAEVDKVTGRFNGQFKTYAICGAIRRMGESHDSFLRMAKADGIVSK

SEQ ID NO: 10685 - protein, 129 aa, Homo sapiens
  DOMAIN (79)..(104): Ribosomal protein S21e proteins domain identified by eMATRIX, accession number BL00996B, p-value=8.412e-29, raw score of 12.33
  DOMAIN (30)..(117): Ribosomal protein S21e domain identified by PFam, accession name Ribosomal_S21e, E-value=1.1e-33, PFam score of 125.3
RRYLCRVTSCFLSLSRAVWWPARRSPAFEMQNGRRRSSSDLYRARGKLSASNRIIGAKDHASIQMNVAEVDKVTGRFNGQFKTYAICGAIRRMGESDDSILRLAKADGIVFKELFDWREITDVGIFCHK

SEQ ID NO: 10686 - protein, 138 aa, Homo sapiens
  misc_feature (1)...(138): Xaa = X or * as defined in Table 2
FRDIVNENGEGEIQDEEEDGYDDDEMTGTGMKESXNSPWVMAGHGGSNPQANRQTSDSSSAKMSTPADKVLRKFENKINLDKLNVTDSVIYKATEKFDTKGIKYVLDPTTRMILFKMLTRGIITDIDGCISTGREANV

SEQ ID NO: 10687 - protein, 590 aa, Homo sapiens
  DOMAIN (354)..(391): RIO1/ZK6323/MJ0444 family proteins. domain identified by eMATRIX, accession number BL01245F, p-value=2.373e-23, raw score of 18.75
  DOMAIN (213)..(412): RIO1/ZK632.3/MJ0444 family domain identified by PFam, accession name RIO1, E-value=3.6e-57, PFam score of 203.3
AVPFHRRAAASGGALQSWTTGGLLMSRVVPGQFDDADSSDSENRDLKTVKEKDDILFEDLQDNVNENGEGEIEDEEWKEGYDDDEMTGTGMKELENSPRVMSGIGRKQPTGKSTDPDSSSAKMSTPADKVLRKFENKINLDKLNVTDSVINKVTEKSRQKEADMYRIKDKADRATVEQVLDPRTRMILFKMVTRGIITEINGCISTGKEANGYHASTANGESRAIKIYKTSILVFKDRDKYVSGEFRFRHGYCRGNPRKMVKTWAEKEMRNLIRLNHSRGYHCPEPIMLRRHGLAMSFIGKDDMPATNFGKMFQLSESKARELYLQVIQYMRRMYQDARLVHADLSEFNIMYHGGGVYIIDVSQSVEHDHPHALEFLRKDCANVNDFFMRHSVAVMTVRELFEFVTDPIPLHHENLDAYLSKAMEIASQRTKERTVSSQDHVDEEVFKRSYIPRNLDEVKNYERDMDIIMKLKEEDMAMNAQQDNILYQTVTGLKKDLSGVQKVPALLENQVEERTCSDSEDIGSSECSDTDSEEQGDHARPKKHTTDPDIDKKERKKEVKEAQREKRKNKIPKHVKKRKEKTAKTKKGK

SEQ ID NO: 10688 - protein, 125 aa, Homo sapiens
  misc_feature (1)...(125): Xaa = X or * as defined in Table 2
KGTYIKQERLENLRTNHLDKYYNPPMKQNYQKLCQKGMASRTHREESRXMRGNRCRLRITRNAXFEGENLQNKAQGENLEKKPEPATYIXEAXESKRDKGVXKSYCVSSFPTMQXKSDXSEYSYG

SEQ ID NO: 10689 - protein, 142 aa, Homo sapiens
  DOMAIN (31)..(83): Histone H3 proteins domain identified by eMATRIX, accession number BL00322A, p-value=1.000e-40, raw score of 9.23
SYKSRLARKSTGGKAPRKQLAYKKPASQECGPLLGGLKKPHRYRPGTVALREIRRYQKSTELMIRKLRFQRLVREIAQDFKTDLRFQERSNQVALQEARRAYLVWPFLKDTNLVCLSMPKRVPIMPKRHSSSARRHHVENVL

SEQ ID NO: 10690 - protein, 48 aa, Homo sapiens
GKVPGDDCPLVWGQCSHCFHMHCILKWLHAQQVQQHCPMCRQEWKFKE

SEQ ID NO: 10691 - protein, 107 aa, Homo sapiens
GSAAMKVKIKCWNGVAHWLWVANDENCGICRMAFNGCCPGCECSPSMLSERPRLQGAPATDCPAGCGGPVLPTCFQHALHPQVGLHAQQVQQALAPMLPPRIGKFKE

SEQ ID NO: 10692 - protein, 2173 aa, Homo sapiens
  DOMAIN (289)..(329): Band 41 family domain proteins. domain identified by eMATRIX, accession number BL00660B, p-value=4.375e-30, raw score of 17.33
  DOMAIN (189)..(388): FERM domain (Band 4.1 family) domain identified by PFam, accession name Band_41, E-value=1.3e-110, PFam score of 346.1
MLRKRKWLGVVAHACNPSTLGGQGHPDKQPQVRRLLSAPGSRIAGQWVLDSLKSPHLLLKGENDKNSLSQKAFLYVAHVLDESERGVLVTMTTETGPDSEVKKAQEEAPQQPEAAAAVTTPVTPAGHGHPEANSNEKHPSQQDTRPAEQSLDMEEKDYSEADGLSERTTPSKAQKSPQKIAKKYKSAICRVTLLDASEYECEVEKHGRGQVLFDLVCEHLNLLEKDYFGLTFCDADSQKNWLDPSKEIKKQIRSEWLVVFGEVGSPWNFAFTVKFYPPDPAQLTEDITRYYLCLQLRADIITGRLPCSFVTHALLGSYAVQAELGDYDAEEHVGNYVSELRFAPNQTRELEERIMELHKTYRGMTPGEAEIHFLENAKKLSMYGVDLHHAKDSEGIDIMLGVCANGLLIYRDRLRINRFAWPKILKISYKRSNFYIKIRPGEYEQFESTIGFKLPNHRSAKRLWKVCIEHHTFFRLVSPEPPPKGFLVMGSKFRYSGRTQAQTRQASALIDRPAPFFERSSSKRYTMSRSLDGAEFSRPASVSENHDAGPDGDKRDEDGESGGQRSEAEEGEVRTPTKIKELKFLDKPEDVLLKHQASINELKRTLKEPNSKLIHRDRDWERERRLPSSPASPSPKGTPEKANESQRTQDISQRDLVPEPGAAAGLEVFTQKSLAASPEGSEHWVFIEREYTRPEELGLLKVTTMQQEERQAGLAGILANGRLSKVDVLVDKFKVEVATEEMVGNRRANTQQQGKMIASPEDFESVGEEGPWIRESPGGAALASGRTLAEKLLEGSELRADTREATIRNRCMSDGQPEGQTELRKGLEEPHTCGRPTAPGTRPAEVDVLSPASDKGGLQSFLLDPAHAEARAELSNETDTSFAERSFYLNYEEKDSEDQVLPPPLEERKGRLDAPPGGEPRPTLNSLDLRVSAAASSRSKDEAHMTSPKEGAGTPKNHGGPGDLKGSPAGQTFAEGWEDAQWGVEGEFPHLTASAAREEGTPVSGDLLGKAEESPTEELKKHPPHRGQGVHPDPQACALPRAIPLNVRKPVKPDRGNFPPKERGVVPTQKGGAELKDREASAFLHMEVIIPLPASPGHSEDLAALEEASPSPTSHGSGEPSELREPFLRHVHLSKASPEPKDQVGFVVSPATGGERRPPPITSRKPRVVPEEAEGRIPLGFGFPSGKRREMTSFQAGDQEGSLEDISKTSVANKIRIFETHGAETRRMSEGEARSLPNDVSSEAPVGQAEQQRSTLSDLGFAQLQPPGDFASPKATHSTVIPLATRHFREDTSASYQEAHTELEPVSPNSGCETTLAEATGTGVTGRNKSGDAVREEKRSTNLAANTPGKGGRLRFASPSGPQRAGLREGSEEKVKPPRPRAPESDTGDEDQDQERDTVFLKDNHLAIERKCSSITVSSTSSLEAEVDFTVIGDYHGSAFEDFSRSLPELDRDKSDSDTEGLLFSRDLNKGAPSQDDESGGIEDSPDRGACSTPDMPQFEPVKTETMTVSSLAIRKKIEPEAVLQTRVSAMDNTQVDGSASVGREFIATTPSITTETISTTMENSLKSGKGAAAMIPGPQTVATEIRSLSPIIGKDVLTSTYGATAETLSTSTTTHVTKTVKGGFSETRIEKRIIITGDEDVDQDQALALAIKEAKLQHPDMLVTKAVVYRETDPSPEERDKKPQKLKRETKNNKRQPCIRRNLQARAILPATQGSAGPLPPSLQSDAKAGELPVRFRCTGTWGEALFIKEKGFFWSPTTGPMAAVQMDPELAKRLFFEGATVVILNMPKGTEFGIDYNSWEVGPKFRGVKMIPPGIHFLHYSSVDKANPKEVGPRMGFFLSLHQRGLTVLRWSTLREEVLDLSPAPESEVEAMRANLQELDQFLGPYPYATLKKWTSLTNFISEATVEKLQPENRQICAFSDVLPVLSMKHTKDRVGQNLPRCGIECKSYQEGLARLPEMKPRAGTEIRFSELPTQMFPEGATPAEITKHSMDLSYALETVLNKQFPSSPQDVLGELQFAFVCFLLGNVYEAFEHWKRLLNLLCRSEAAMMKHHTLYINLISILYHQLGEIPADFFVDIVSQDNFLTSTLQKGFLIDISEDFIEVLFLRGTERFSKANLLLDESLIAVDATLRKKAEKFQAHLTKKFRWDFAAEPEDCAPVVVELPEGIEMG

SEQ ID NO: 10693 - protein, 410 aa, Homo sapiens
GCTGTWGEALFIKEKGFFWSPATGPMAAVQMDPELAKRLFFEGATVVILNMPKGTEFGIDYNSWEVGPKLRGVKMIPPGIHFLHYSSVDKANPKEVGPRMGFFLSLHQRGLTVLRWSTLREEVDLSPAPESEVEAMRANLQELDQFLGPYPYATLKKWISLTNFISEATVKKLQPENRQICAFSDVLPVLSMKHTKDRVGQNLPRCGIECKSYQEGLARLPEMKPRAGTEIRFSELPTQMFPEGATPAEITKHSMDLSYALETVHNKQFPSSPQDVLGELQFAFVCFLLGNVYEAFEHWKRLLNLLCRSEAAMKKHATRLWINLISILHHQLGEIPADFFVDIVSQHNFLTSTLQVFFSSACSIAVDATLRKKAEKFQAHLTKKFRWDFAEEPEDCAPVVEELPEGIEMG

SEQ ID NO: 10694 - protein, 54 aa, Homo sapiens
FKLYKLFIKFLPVLENGGVVQVGELLPCKICGRTFFPVALVSRLILYLYGFTDL

SEQ ID NO: 10695 - protein, 336 aa, Homo sapiens
ARGGGAMEGLEENGGVVQVGELLPCKICGRTFFPVALKKHGPICQKTATKKRKTFDSSRQRAEGTDIPTVKPLKPRPEPPKKPSNWRRKHEEFIATIRAAKGLDQALKEGGKLPPPPPPSYDPGFIIQWCPYCQRKIPMENAADRHINFCKEQAARISNKRRFSTDTKGKPTSRTQVYKPPALKKSNSPGTASSGSSRVPQPSGAGKTVVGVPSQGKVSSSSSSLGNTKLQTLSPSHKGIAAPHAGANVKPRNSTPPSFARNPAPGVLTNKRKTYTESYIARPDGDCASSLNGGNIKGIEGHSPGNFPKFCHECGTKYPVEWAKFCCECGIRRMIL

SEQ ID NO: 10696 - protein, 184 aa, Homo sapiens [sequence omitted]

SEQ ID NO: 10697 - protein, 145 aa, Homo sapiens
PTCLHLLPYATVPNFPTFSCLFLSPPNCSNLCLLPSSKVTSTFSGIFSAMPHTTLLQFPISFSFPSETSLAWPSFSISLSAFWSQLFNNCLGSAKLSCLLLSPPNCSNLCLLSSSKASSTFSSITTRLESLLRGLSQDVSGKYKT

SEQ ID NO: 10698 - protein, 164 aa, Homo sapiens
EVTACRQPSVAFSTSLALALTLALLEEPFSLLLHCESPLLGWASSCGGCAGSPSSAGPAGIVLKSLAGPQLPPCRVGLGTCSLPYLSLPPAVGSFMARASLMSAAPCSMARVPSTTQGLLSRTPQCGQMAQDWQAAPPASPVQDPLEEASWAPESSGDLENFYV

SEQ ID NO: 10699 - protein, 46 aa, Homo sapiens
MLFLRYAPLVGGSFCIWSHPLQFFLTSIKVNFVETLFCFQSFKDIF

SEQ ID NO: 10700 - protein, 152 aa, Homo sapiens
  misc_feature (1)...(152): Xaa = X or * as defined in Table 2
EPLPGLAKAGAGSLSCSVRPCAAGASPTSATPCSIAPSPIDHPRAEECGRMVQDWQAAPPAPRCGIHWVKPAGLLSLLMSMVIRINMIVKLLVFVILLVTXFTVKVCLYIFQGLCCGLLFCKILHGSPSHHRPKDLWHHCDLDVRHEVKGDH

SEQ ID NO: 10701 - protein, 124 aa, Homo sapiens
  misc_feature (1)...(124): Xaa = X or * as defined in Table 2
YSLKSGSVMPPALFFWLRIALAMQALFWFHMNFKVVFSNSLKKVIGSFMGMALNLXITLGSMAIFTILILPTHEHGMFFHLFVSSFISLSSGLXFSLKRSFTSLVSWIPRYFILFEAIVNGSSL

SEQ ID NO: 10702 - protein, 132 aa, Homo sapiens
GRASGVVRSPRWVCDLAGFRGEAADLHGVCYSRLRSPAGFTQWIQHQGSRWSCLPVPRRAPALLALGWSMGWAPPQPLAWVLSPSLPGAGSADWLLQVRGPPSPRPPGTPAGPPAPCAALVPARVSPSTLPS

SEQ ID NO: 10703 - protein, 180 aa, Homo sapiens
  misc_feature (1)...(180): Xaa = X or * as defined in Table 2
LRSPAGFTQWIRTGAAGGAACQFRAVRPALLSPWVVDGTGRRGAGGGAYRGGSGRTGAHGTGGGSGMAGCRSRAVPRRKAAKTRPCEVQKRQHNVNYLFPVVETKAQTVKWFVLAXASPCSVGSCAARASPISAAPCSTAPSPIDHPRAEECWAHGTELAGSSTCSPGADPLGEASWAPE

SEQ ID NO: 10704 - protein, 42 aa, Homo sapiens
  misc_feature (1)...(42): Xaa = X or * as defined in Table 2
KILSSKFPFSFLPSYVCTSSFPXTHPSIISTSSSSSHSVPTN

SEQ ID NO: 10705 - protein, 119 aa, Homo sapiens
  misc_feature (1)...(119): Xaa = X or * as defined in Table 2
AVTLTGKVCSFTPEASETTNPPGGTNNSRRASLRAATLTVKVRSFTPRGSAASFFKSVRPRTHQFRTQYSPRMSKIRDCSRSCSFISFLASWRIICLLXVLISLCAWXRYRLFWPLPSS

SEQ ID NO: 10706 - protein, 142 aa, Homo sapiens
  misc_feature (1)...(142): Xaa = X or * as defined in Table 2
LSTKAPRKDTLFNKWCWENWISICRRLQLGSYLLPYXKINQKWIKGLNDRSETMKLLKENIGEMLKNIGLGKDFMVKTSKAXATKQKIGRWDYIKLKICTAKKTIRVKRPTVDGNNIFKLSNRGLISRVYKEHNSTVKKKKK

SEQ ID NO: 10707 - protein, 74 aa, Homo sapiens
  misc_feature (1)...(74): Xaa = X or * as defined in Table 2
REFRVGVASADPAFGAAGRPCPQGQXGAXHTGQWLRRVYWVPQQCQPTGVALDFSPGLSCLPAGQGSGPAARHA

SEQ ID NO: 10708 - protein, 113 aa, Homo sapiens
  misc_feature (1)...(113): Xaa = X or * as defined in Table 2
HAVFFISIRSFMFFFKLVILVSNSSKLFSTFLVSLHWVRTCSFSSEEFVITHFLKPTSVNSSNSFSVQFCSLAGEELXSFGGEEAFWFLEFSAFLHWFFLIFMDLSTFGLCCC

SEQ ID NO: 10709 - protein, 44 aa, Homo sapiens
WIPHRGCRWSCLPVPVPCARTPQPLGGGWDWARTHQTHCKLDLS

SEQ ID NO: 10710 - protein, 39 aa, Homo sapiens
WLGQMEIQNHVPKIQMELCGQHSAAAVSLLKAGGRALQE

SEQ ID NO: 10711 - protein, 71 aa, Homo sapiens
LKTFHTAVFVRFGPWLPDTGFCSSLSFQFSFLISLDTLPYRKGVICLLEALDDLLFFLVETWYHQEAVSAL

SEQ ID NO: 10712 - protein, 553 aa, Homo sapiens
  DOMAIN (142)..(181): GLYCOPROTEIN PRECURSOR IMMUNOGLOBULIN FOL domain identified by eMATRIX, accession number PD02886C, p-value=4.758e-09, raw score of 21.92
  DOMAIN (61)..(553): Monocarboxylate transporter domain identified by PFam, accession name MCT, E-value=6.4e-167, PFam score of 567.9
SLLTAASSFQPQLKQSSHLSHPSGWDYRLRMTQNKLKLCSKANVYTEVPDGGWGWAVAVSFFFVEVFTYGIIKTFGVFFNDLMDSFNESNSRISWIISICVFVLTFSAPLATVLSNRLGHRLVVMLGGLLVSTGMVAASFSQEVSHMYVAIGIISGLGYCFSFLPTVTILSQYFGTRRSIVTAVASTGECFAVFAFAPAIMALKERIGWRYSLLFVGLLQLNIVIFGALLRPIFIRGPASPKIVIQENRKEAQYMLENEKTRTSIDSIDSGVELTTSPKNVPTHTNLELEPKADMQQVLVKTSPRPSEKKAPLLDFSILKEKSFICYALFGLFATLGFFAPSLYIIPLGISLGIDQDRAAFLLSTMAIAEVFGRIGAGFVLNREPIRKIYIELICVILLTVSLFAFTFATEFWGLMSCSIFFGFMVGTIGGLTFHCLLKMMSWALQKMSSAAGVYIFIQSIAGLAGPPLAGLLVDQSKIYSRAFYSCAAGMALAAVCLALVRPCKMGLCQRHHSGETKVVSHRGKTLQDIPEDFLEMDLAKNEHRVHVQMEPV

SEQ ID NO: 10713 - protein, 824 aa, Homo sapiens
  DOMAIN (311)..(761): Monocarboxylate transporter domain identified by PFam, accession name MCT, E-value=3.2e-132, PFam score of 452.7
GFVFLLLLAPLSRLEFHKSRGLKNVFEGLEAEECFYKVHLDGGEEELEWVRPDAETTTHQGRVSQEKHQALGCKWPKLCGDALCVILSAPSPIDHPKAEECRRRARDWQAAPPAAPVRDPLGEASWAPESGQQMKEAAELGVSCMGPDLEKLTLYEVKLRLQGCKAAQRPLGCTLLAIQGTLYQRIFSPLTQPELVNGKGWHLTQESLSQNGSLEFLTSEPHSPNPNEGSSRRQSLHTNANNMAFASEQFPNLPSGSGSRGFPGRARVLHLDCQNCQRLTAGPAQLQGSRAANRRKALVSPSSSVAREDGFAEEMVFTYGIIKTFGVFFNDLMDSFNESNSRISWIISICVFVLTFSAPLATVLSNRFGHRLVVMLGGLLVSTGMVAASFSQEVSHMYVAIGIISAIMALKERIGWRYSLLFVGLLQLNIVIFGALLRPIFIRGPASPKIVIQENRKEAQYMLENEKTRTSIDSIDSGVELTTSPKNVPTHTNLELEPKADMQQVLVKTSPRPSEKKAPLLDFSILKEKSFICYALFGLFATLGFFAPSLYIIPLGISLGIDQDRAAFLLSTMAIAEVFGRIGAGFVLNREPIRKIYIELICVILLTVSLFAFTFATEFWGLMSCSIFFGFMVGTIGGLTFHCLLRMMSWALQKMSSAAGVYIFIQSIAGLAGPPLAGLLVDQSKIYSRAFYSCAAGMALAAVCLALVRPCKMGLCQHHHSGETKVVSHRGKTLQDIPEDFLEMDLAKNEHRVHVQMEPVVRRRFAAAGPAGLGAAGDSDAFPAREGPERRAGYSGPAAACFDFSTAAPKREQRGPLSLVGLEM

SEQ ID NO: 10714 - protein, 327 aa, Homo sapiens
  misc_feature (1)...(327): Xaa = X or * as defined in Table 2
STLYLPAMDTNQEEIPDLLALGTSAWSSTLAALEEPFSLPLHCGSPFLGWSRPELAPSACREVWREKPEWELGLRTVLAGQCEFRVGVGSGDSTRSSWPPLLAPGNEGLSTRASSCGGCTGSPSRAGPPVLCSISCQALAAFPRGRARGLQPAMPEPPPRLRGLLCSPEPPRLVPPPAPGHPVPLTTQGLRSTGTKHRDWQAAPPAAPVRDPLGEASWAPESANLVGKWRTFVSSSGTANAPISTLSKQTTGLYQSAGCGWGQNLGAKYRALCRPVKSDXHGRQTKDTGVRLSGKGLSNNPXLFRVGTVGSHRPHFPTYMDGLASGV

SEQ ID NO: 10715 - protein, 1184 aa, Homo sapiens
  DOMAIN (1083)..(1131): Ribosomal protein L30e proteins domain identified by eMATRIX, accession number BL00709A, p-value=1.000e-40, raw score of 24.45
  DOMAIN (406)..(1002): von Willebrand factor type A domain identified by PFam, accession name vwa, E-value=3.2e-125, PFam score of 429.4
MCELDILHDSLYQFCPELHLKRLNSLTLACHALLDCKTLTLTELGRNLPTKARTKHNIKRIDRLLGNRHLHKERLAVYRWHASFICSGNTMPIVLVDWSDIREQKRLMVLRASVALHGRSVTLYEKAFPLSEQCSKKAHDQFLADLASILPSNTTPLIVSDAGFKVPWYKSVEKLGWYWLSRVRGKVQYADLGAENWKPISNLHDMSSSHSKTLGYKRLTKSNPISCQILLYKSRSKGRKNQRSTRTHCHHPSPKIYSASAKEPWVLATNLPVEIRTPKQLVNIYSKRMQIEETFRDLKSPAYGLGLRHSRTSSSERFDIMLLIALMLQLTCWLAGVHAQKQGWDKHFQANTVRNRNKEVEVNDLSGLISDVVMSPIPLTSLLCGNPDEIRSFPSLCPECTEGPIDLVFVIDGSKSLGEENFEVVKQFVTGIIDSLTISPKAARVGLLQYSTQVHTEFTLRNFNSAKDMKKAVAHMKYMGKGSMTGLALKHMFERSFTQGEGARPLSTRVPRAAIVFTDGRAQDDVSEWASKAKANGITMYAVGVGKAIEEELQEIASEPTNKHLFYAEDFSTMDEISEKLKKGICEGINYCALNKPGCEHECVNMEESYYCRCHRGYTLDPNGKTCSRVDHCAQQDHGCEQLCLNTEDSFVCQCSEGFLINEDLKTCSRVDYCLLSDHGCEYSCVNMDRSFACQCPEGHVAAAMGRRVQSVLGEEDAPEKRFALLSDPGDLTAHELDSCALGDHGCEHSCVSSEDSFVCQCFEGYILREDGKTCRRKDVCQAIDHGCEHICVNSDDSYTCECLEGFRLAEDGKRCRKSSCENKRADLVFIIDSSRSVNTHDYAKVKEFIVDILQFLDIGPDVTRVGLLQYGSTVKNEFSLKTFKRKSEVERAVKRMRHLSTGTMTGLAIQYALNIAFSEAEGARPLRENVPRVIMIVTDGRPQDSVAEVAAKARDTGILIFAIGVGQVDFNTLKSIGSEPHEDHVFLVANFSQIETLTSVFQKKLCTILASGTNSNRQLPSAFAPPLLLAICFRFRSRSSGSARRALHCGKSFLSRSPAILAAAVGRKMVAAKKTKKSLESINSRLQLVMKSGKYVLGYKQTLKMIRQGKAKLVILANNCPALRKSEIEYYAMLAKTGVHHYSGNNIELGTACGKYYRVCTLAIIDPGDSDIIRSMPEQTGEK

SEQ ID NO: 10716 - protein, 89 aa, Homo sapiens
  DOMAIN (7)..(55): Ribosomal protein L30e proteins domain identified by eMATRIX, accession number BL00709A, p-value=2.324e-34, raw score of 24.45
KKSLLSINSRLQLVMKSGKYVLGYKQTLKMIRQGKAKLVILANNCPALSGNNIELGTACGKYYRVCTLAIIDPGDSDIIRSMPEQTGEK

SEQ ID NO: 10717 - protein, 122 aa, Homo sapiens
  DOMAIN (84)..(104): kw TRANSCRIPTASE REVERSE II ORF2 domain identified by eMATRIX, accession number DM01354W, p-value=9.818e-09, raw score of 12.64
  misc_feature (1)...(122): Xaa = X or * as defined in Table 2
KKQIFLELISIYSRVAGYKNTQKSVAFLYNSNKQLNLXIKDTMPFILACNKXKHLPLNLTKXVQEIYEGNYDTFMKXIEDDKQRNISSSWXKRFIKMPILPNLIYRYNAFPVKISESYLVDI

SEQ ID NO: 10718 - protein, 212 aa, Homo sapiens
  DOMAIN (41)..(89): Ribosomal protein L30e proteins domain identified by eMATRIX, accession number BL00709A, p-value=6.850e-12, raw score of 24.45
  misc_feature (1)...(212): Xaa = X or * as defined in Table 2
LRILKFLSCSLSLLGWGPSPSLRQEDGGRKRRRKKSLESINLRLQLVMKSGKLLPGGTSQTLKMIRQGKAKLVILANNCGPALRKSEIEYYCYVWLKTGCHHPLTVGNNIELGATACGKITYRVLHTGLFIDPGXLLTSFRKACPEQTCXKMVAAKEDEKSRWSRSTLGSNSLWKSGKLLPGGTSQTLKMIQTRQSEMWSFSLTTGPSFEEI

SEQ ID NO: 10719 - protein, 860 aa, Homo sapiens
  DOMAIN (24)..(71): kw TRANSCRIPTASE REVERSE II ORF2 domain identified by eMATRIX, accession number DM01354V, p-value=1.000e-40, raw score of 12.97
  DOMAIN (630)..(697): HMG (high mobility group) box domain identified by PFam, accession name HMG_box, E-value=0.0019, PFam score of 6.1
MGSHHLVVVLIESPQTESQIVSDSHASKRIKYLGIHLTRDVKDLFKENYKPLLNEIKEDTNKWKNIPCSWVGRINIMKMAILPKVVYRFNAIPIKLPMTFFTELEKTTLKFIWNQKTAHIAKSILRQKNKAGGIMLPDFKLYYKATVTKTAWYWYQNRDIDQWNRTEPSEIMPHIYNYLIFDKPEKNKQWGKDSLFNKWCWENWLAICRKLKLDPFLTPYTKINSRWIKDLNVRPKTIKTLEENLGITIQHIGTGKDFMSKTPKAMATKAKTDKWDLIKLKSFCTAKETTIRVNRQPTKWEKIFATYSSDKGLISRIYNELQQIYKKKTNNPIKKWVKDMNRHFSKEDIYAAKKHMKKCSPSLAIREMQIKTTMRYHLTPVRMAIIKKSGNNSKLPFEPSRNKRVMPEPCAHTILSSLARPASKMHSPPLSMEPSAGPGGSQNFPNEEAEDRPRTLNFEGSETWALTGPDARYFNYTREARGENSLVSGGCRPLAAGRARASTSGWAAKRVGTLQGGPLTWAMPAPISPPPMTVTCLTIIFLAEAEAVDEEDTERMNCLVTKAMVWQRRRQRGDPGREDARGGQPRKARLWGRGPTRPCSPRAPGVPVTPQGGGGASSPALPIGPGCNVPALSGYTRAGSQLSAAGARVSAGLRPAEQRDLAAGVLWHALSREEQAKYYELARKERQLHMQLYPGWSARDNYKRGILSCHRLYHEHTDECDVEVQAGGQQRAFSRELAPPVAAVVLPATCTLKMGSQSVSPYQKRLCNFLVMGELFPLPSPLQFLDQVIKTPMTSQKTFESLVDFSKALGKHPVSCKVAAATGHTVVLVDQTEDILAKSKKGIEESLRKVAKKKFAENPK

SEQ ID NO: 10720 - protein, 462 aa, Homo sapiens
  DOMAIN (330)..(379): HMG (high mobility group) box domain identified by PFam, accession name HMG_box, E-value=0.00044, PFam score of 11.9
APVTENNGSPFGSQNELFPEPCFLLDKTEILTPNLGMALGLNDCQGAVTCEIRGSLQIFGLRNLDCDDDVPHIRSSNKVPVVQPSHAVHPLTPLITYSDEHFSPGSHPSHIPSDVNSKQGMSRHPPAPDIPTFYPLSPGGVGQITPPLGWFFNEQLIFFKNEFRRIEYLPLLVSGQVRQGQPVYPITGGFRQPYPSSLSVDTSMSRCQRESRVGALRCAPAGPATPSGDGLSLLGKRCLQTNSWPPDCGMGTVRKADITRRVCLIQNMPGVGFSHHMIPGPPGPHTTGIPHPAIVTPQVKQEHPHTDSDLMHVKPQHEQRKEQEPKRPHIKKPLNAFMLYMKEMRANVVAECTLKESAAINQILGRRRDQYLSLCLPPRHIIHMSIIVIEMWHVSGTPVFSAPRLHTVTQLLSGQFCSAGGRLIKALGKVRHSWSGDTQPAARAALTEPCTAEAVAQMERLF

SEQ ID NO: 10721 - protein, 469 aa, Homo sapiens
  DOMAIN (372)..(446): HMG (high mobility group) box domain identified by PFam, accession name HMG_box, E-value=2e-25, PFam score of 97.9
RPPGIRAPRQLHPAAGRRPDASARPRFRPTVLLHDPFQLSFPPPPLSYPSVFPAVARVLPQRSGDYRAAGMPQLSGGGGGGGGDPELCATDEMIPFKDEGDPQREKIFAEIVNPEEEGDLADIKSSLVNESEIIPASNGHEVARQAQTSQEPYHDKAREHPDDGKHPDGGLYNKGPSYSSYSGYIMMPNMNNDPYMSNGSLSPPIPRTSNKVPVVQPSHAVHPLTPLITYSDEHFSPGSHPSHIPSDVNSKQGMSRHPPAPDIPTFYPLSPGGVGQITPPLGWQGQPVYPITGGFRQPYPSSLSGDTSMSRFSHPMIPGPPGPHTIGIPHPAIVTPQVKQDHPHHSSDLMHVKPQPEQRKEQEPKRPPTKKPLNAFMLYMKEMRANVVAECTLKESAAINQILGRRWHALSREEQAKYYELARKERQLHMQLYPGWSARDNYGKKKKRKREKLQESASGTGPRMTAAYI

SEQ ID NO: 10722 - protein, 125 aa, Homo sapiens
STCPAPQSARVQWCNLSSLQPPPPTPTPRSSNSPASASQIAGITGVRHHTQLIFVFLVGDGGFHCVGSGWVSNCWPSGWRPLWPHLFLGFHKDLEVVGFLVFASISFRSWRWDLKNSSVLTHFFK

SEQ ID NO: 10723 - protein, 129 aa, Homo sapiens
NHFQHTLLWPKGFSLRTSNLTTTNLGFSHISGHWSWGAHGACSPCPHISSQPGPCPASIYRPDSPHLPPCCPELNIDLHLDVTWSVTWECYGSIIPRPTVAHGAKTSKQPPSWKGNAKALGVMEKTFYK

SEQ ID NO: 10724 - protein, 220 aa, Homo sapiens
GQGRLPERGYLAEAGVYRICGRQSRHEDGTHRGAQVIEQRRKWLPAALGFQPIILQLCGKRVPAPSRASTGQPQASRAWSGPLPHPQCGSDIRLRVRAEYCEHGPALEQGVASRRPQALARQLDVFGQATAVLRSRDLGSVVCDIKFSELSYLDAFWGDYLSGALLQALRGVFLTEALREAVGREAVRLLVSVDEADYEAGRRRLLLMEEEGGRRPTEAS

SEQ ID NO: 10725 - protein, 122 aa, Homo sapiens
QMYCVFNRNEDACRYGSAIGVLAFLASAFFLVVDAYFPQISNATDRKYLVIGDLLFSGVLASLAYQRYKAGVDDFIQNYVDPTPDPNTAYASYPGASVDNYQQPPFTQNAETTEGYQPPPVY

SEQ ID NO: 10726 - protein, 452 aa, Homo sapiens
MGRGRGDLQPSGLGRPRTPAAPRAGREPGAARVRIDRGADAAAAARPRLLCEPVPGPGCRELGPAPLARAYWKRAPERRKARRLEPGAALGRGQGRARCSGAPGCRALLGHTGRVPPPGTRPVLRAPRASQRRSPQAVVKGMKLGFAQGGGHQASSGSSGSSNELGGHQPYQVLPSRQVFALIVFSCIYGEGYSNAHESKQMYCVFNRNEDACRYGSAIGVLAFLASAFFLVVDAYFPQISNATDRKYLVIGDLLFSALWTFLWFEGFCFLNNQWAVNKPKDVLVGADSGSEPPKRGSKVNPGARRLSSGCPSDRPELIRPRCRIRAEARNSTSRKHIQRNIHERRRTHDTPEQQKKNTATTGTAQRFNLPQFNCPLIGPPLALRGSPLHEIGIRTSKGFFSSLLNGNHFEYLSTLTGELPWSRNCIGYGRNPLYHYMPTGRLQRRIEQRST

SEQ ID NO: 10727 - protein, 232 aa, Homo sapiens
GGGSGGDGDMESGAYGAAKAGGSFDLRRFLTQPQVVARAVVLVFALIVFSCIYGEGYSNAHESKQMYCVFNRNEDACRYGSAIGVLAFLASAFFLVVDAYFPQISNATDRKYLVIGDLLFSALWTFLWFVGFCFLTNQWAVTKPKTVLVGADSVRAAITFSFFSIFSWGVLASLGYQRYKAGVDDFIQNYVDPTPDPNTAYASYPGASVDNYQQPPFTQNAETTEGYQPPPV

SEQ ID NO: 10728 - protein, 140 aa, Homo sapiens; identical to SEQ ID NO: 8052
  DOMAIN (87)..(99): Globins profile domain identified by eMATRIX, accession number BL01033B, p-value=7.000e-14, raw score of 13.81
  DOMAIN (14)..(140): Globin domain identified by PFam, accession name globin, E- value=1.3e-37, PFam score of 135.6

SEQ ID NO: 10729 - protein, 114 aa, Homo sapiens
  misc_feature (1)...(114): Xaa = X or * as defined in Table 2
NGPPFFFFFEMEFSLLLPRLECNGAISAHRNLRLPGSSDSPASAGGLLXSQVAGITRLRHHDXLILYFLVEMRFHRVGXAGLELLTSGDPPSSASQGAGITGMSHSAGHYGKIF

SEQ ID NO: 10730 - protein, 56 aa, Homo sapiens
RILMAINGKVFDVTKGRKFYGPVKYHHVGKLLTAGEEPAVYSDEEEPKDESARKND

SEQ ID NO: 10731 - protein, 83 aa, Homo sapiens
LSLQEFGTSFAGRDASRGLATFCLDKEALKDEYDDLSDLTAAQQETLSDWESQFTFKLLKEGEEPTVYSDEEEPKDESARKND

SEQ ID NO: 10732 - protein, 228 aa, Homo sapiens
PARHSLAQREEKVASSGSLPSAAQPLLSEIMAAEDVVATGADPSDLESGGLLHEIFTSPLNLLLLGLCIFLLYKIVRGDQPAASGDSDDDEPPPLPRLKRRDFTPAELRRFDGVQDPAPYSWAINGKVFDVTKGRKFLTGPEGPYGVFAGRKCIQGALPTFLLDKEALKDEYDDLSDLTAAQQETLSDWESQFTFKYHHVGKLLKEGEEPTVYSDEEEPKDESARKND

SEQ ID NO: 10733 - protein, 217 aa, Homo sapiens
  DOMAIN (14)..(39): Ribosomal protein L13 proteins domain identified by eMATRIX, accession number BL00783A, p-value=4.000e-09, raw score of 14.55
  DOMAIN (12)..(147): Ribosomal protein L13 domain identified by PFam, accession name Ribosomal_L13, E-value=9.6e-05, PFam score of 0.2
KRLPKMAEVQVLVLDGRAHSSLGRLAAIVAKQVLLGRKVVVVRCEGINISGNFYRNKLKYLGFPPPSGMNTNPSRGPYHFGAPSRILLAGTVRGMLPHKTKAEAKAALDRLKVFDGIPPPYGQEKSGMVVPAALKVVRLKPTRKFCLIWGRLAPEVGWKYQAVTATLEEKRKREKPRFHYRKKENSIMRLRKQAREETWRKKIDKYTEVLKTHGLLV

SEQ ID NO: 10734 - protein, 79 aa, Homo sapiens
  DOMAIN (21)..(74): Death effector domain proteins domain identified by eMATRIX, accession number PF01335A, p-value=2.756e-35, raw score of 25.98
  DOMAIN (10)..(77): Death effector domain identified by PFam, accession name DED, E-value=8.2e-13, PFam score of 56.0
ALSSRGVMAEYGTLLQDLTNNITLEDLEQLKSACKEDIPSEKSEEITTGSAWFSFLESHNKLDKDNLFHSVVPTQTVAL

SEQ ID NO: 10735 - protein, 79 aa, Homo sapiens
  DOMAIN (50)..(68): Death effector domain proteins domain identified by eMATRIX, accession number PF01335B, p-value=2.565e-15, raw score of 17.82
ALSSRGDNLSYIEHIFEISRRPDLLTMVVDYRTRVLKISEEDELDTKLTRIPSAKKYKDIIRQPSEEEIIKLAPPPKKA

SEQ ID NO: 10736 - protein, 29 aa, Homo sapiens
  misc_feature (1)...(29): Xaa = X or * as defined in Table 2
NFNGRGGLAAGRRKKPDWLDSTLNSXPSH

SEQ ID NO: 10737 - protein, 26 aa, Homo sapiens
RPTRPPTRPDLLRKPFFTRYPGPLGL

SEQ ID NO: 10738 - protein, 96 aa, Homo sapiens
  DOMAIN (18)..(46): !!!! PROTEIN ALU SUBFAMILY WARNING ENTRY NUCLEAR PHOSPHO domain identified by eMATRIX, accession number PD02454B, p-value= 5.755e-23, raw score of 11.61
  misc_feature (1)...(96): Xaa = X or * as defined in Table 2
CHACNPQHFGRPRQVDHLRSGVXDQPGQHGETPSLLKIQKLAGHGGVHLXSXLLRRLRQENRLNLGGGGCSEPRSHHCTPAWVTEXDSVSRRKKKK

SEQ ID NO: 10739 - protein, 137 aa, Homo sapiens
  DOMAIN (21)..(74): Death effector domain proteins domain identified by eMATRIX, accession number PF01335A, p-value=1.000e-40, raw score of 25.98
  DOMAIN (10)..(95): Death effector domain identified by PFam, accession name DED, E-value=2.2e-31, PFam score of 117.7
ALSSRGVMAEYGTLLQDLTNNITLEDLEQLKSAFKEDIPSEKSEEITTGSAWFSFLESHNKLDKDNLSYIEHIFEISRRPDLLTMVVDYRTRVLKISEEDELDTKLTRIPSAKKYKDIIRLPSEEEIIKLAPPPKKA

SEQ ID NO: 10740 - protein, 90 aa, Homo sapiens
PTVLWEPPSFPPPPPQGIPIHSGPDTLTGRRRASPSGLCYSENGGLTEEGSTRPPAHSPGATVSSPPPPPPPPSSSLPCCLGNRHFDDRV

SEQ ID NO: 10741 - protein, 29 aa, Homo sapiens
EFFILTFKNNIFIYRYNRISREWTQKYAM

SEQ ID NO: 10742 - protein, 38 aa, Homo sapiens
  misc_feature (1)...(38): Xaa = X or * as defined in Table 2
QLQVCYCTXRPYSGTRCGVSNVQLLLCSLLSHLCCSAS

SEQ ID NO: 10743 - protein, 57 aa, Homo sapiens
AYTERSEEARRQAHTMALKRINKELSDLARDPPAQCSAGPVGDDMFHWQATIMGPND

SEQ ID NO: 10744 - protein, 157 aa, Homo sapiens
  DOMAIN (52)..(100): Ubiquitin-conjugating enzymes proteins domain identified by eMATRIX, accession number BL00183, p-value=9.379e-33, raw score of 28.97
  DOMAIN (7)..(157): Ubiquitin-conjugating enzyme domain identified by PFam, accession name UQ_con, E-value=1.6e-40, PFam score of 148.0
GARRQAHTMALKRINKELSDLARDPPAQCSAGPVGDDMFHWKATINGDLMDKPIFKGGVFFLTIHFPTDYPFKTPKVAFTTRIYHPNINSNGSICLDILRSQWSPALTISKVLLSICSLLCDPNPDDPLVPEIARVYKTDRDKYNRISREWTQKYAM

SEQ ID NO: 10745 - protein, 157 aa, Homo sapiens
MLLLKTTERFEVSVCMACTYVSNLGKKQRSVSFLASGLMRVSTGPELRLHHSFVLTGDVGRRICRLLVGLFTKGDTSSKRVHPFSPGPCFLLCDLARVGSSPKINRVPHFTRTQTSTQRSCTVFVWQRCSLVGPFQVTVFTMYFHHSLRSISRFSSG

SEQ ID NO: 10746 - protein, 64 aa, Homo sapiens
MEPAAPSQKPSRGSGPLPRIPLLAATPLHTRRQPGPRHRRTAEEIVGALFGTANLTANGAVGGE

SEQ ID NO: 10747 - protein, 286 aa, Homo sapiens
MQNLKLDSLLLKATDLIREQPHLNPAVPHLQQKERLPGLSDKAAAPLAVRFAVPKSCKKTGLETGIQLQIHPLHAKGPGRASTAPPQPEVTHRADYFFRRPPVARPRLSPAGSIHAKSVGSGSCRAKGGCRTRSSRTWNNRGRLRDPGASLGPRMYSHGIELACQKQKEFVKSSVACKWNLAEAQQKLGSLALHNSESLDQEHAKAQTAVSELRQREEEWRQKEEALVQREKMCLWSTDAISKDVFNKSFINQDKRKDTEDEDKSESFMQKYEQKIRHFGFGYDAL

SEQ ID NO: 10748 - protein, 398 aa, Homo sapiens
DPEQPDMEQPWPPPGPWSLPRAEGEAEEESDFDVFPSSPRCPQLPGGGAQMYSHGIELACQKQKEFVKSSVACKWNLAEAQQKLGSLALHNSESLDQEHAKAQTSSIRTEGNGKKNWRQKEEALRQREKMCLWSTDAISKDVFNKSFINQDKRKDTEDEDKSESFMQKYEQKIRHFGMLSRWDDSQRFLSDHPYLVCEETAKYLILWCFHLEAEKKGALMEQIAHQAVVMQFIMEMAKNCNVDPRGCFRLFFQKAKAEEEGYFEAFKNELEAFKSRVRLYSQSQSFQPMTVQNHVPHSGVGSIGLLESLPQNPDYLQYSISTALCSLNSVVHKEDDEPKMMGHCIIWVKTAEAKCYFVTGKGGTWAIFLDTFMGVLALYFCSVFDGRERVLKCFVNFF

SEQ ID NO: 10749 - protein, 774 aa, Homo sapiens
  DOMAIN (212)..(253): Carboxylesterases type-B serine proteins domain identified by eMATRIX, accession number BL00122E, p-value=3.348e-39, raw score of 22.02
  DOMAIN (30)..(574): Carboxylesterases domain identified by PFam, accession name COesterase, E-value=5.1e-233, PFam score of 787.5
MHHGKRELLPKMDRRWHWGRQLLLNRLGAVYTEGGFVEGVNKKLGLLGDSVDIFKGIPFAAPTKALENPQPHPGWQGTLKAKNFKKRCLQATITQDSTYGDEDCLYLNIWVPQGRKQGTCCTGTGDRLETGPGGASGVTSRSPISVSRDLPVMIWIYGGAFLMGSGHGANFLNNYLYDGEEIATRGNVIVVTFNYRVGPLGFLSTGDANLPGNYGLRDQHMAIAWVKRNIAAFGGDPNNITLFGESAGGASVSLQTLSPYNKGLIRRAISQSGVALSPWVIQKNPLFWAKKVAEKVGCPVGDAARMAQCLKVTDPRALTLAYKVPLAGLEYPMLHYVGFVPVIDGDFIPADPINLYANAADIDYIAGTNNMDGHIFASIDMPAINKGNKKVTEEDFYKLVSEFTITKGLRGAKTTFDVYTESWAQDPSQENKKKTVVDFETDVLFLVPTEIALAQHRANAKSAKTYAYLFSHPSRMPVYPKWVGADHADDIQYVFGKPFATPTGYRPQDRTVSKAMIAYWTNFAKTGDPNMGDSAVPTHWEPYTTENSGYLEITKKMGSSSMKRSLRTNFLRYWTLTYLALPTVTDQEATPVPPTGDSEATPVPPTGDSETAPVPPTGDSGAPPVPPTGDSGAPPVPPTGDSGAPPVPPTGDSGAPPVPPTGDSGAPPVPPTGDSGAPPVPPTGDSGAPPVPPTGDAGPPPVPPTGDSGAPPVPPTGDSGAPPVTPTGDSETAPVPPTGDSGAPPVPPTGDSEAAPVPPTDDSKEAQMPAVIRF

SEQ ID NO: 10750 - protein, 125 aa, Homo sapiens
SICLPPVAPWLRPVHRQLGEANEEFALRVQQLVAKELGQTGTRLTPADKAEHMKRQRHPRLRPQSAQSSFPPSPGPSPDVQLATLAQRVKEVLPHVPLGVIQRDLAKTGCVDLTITNLLEGAVAF

SEQ ID NO: 10751 - protein, 134 aa, Homo sapiens
LGIHVFLVSCALPDSVLRRFVVRTMCAVLGLVARQEDSGLRDHSVRVLISNHVTPFDHNIVNLLTTCSTPLLKRFCASTRLPPTPLLLFPEEEATNGREGLLRFSSWPFSIQDVVQPLTLQVQRPLVSVTVSDA

SEQ ID NO: 10752 - protein, 115 aa, Homo sapiens
LRPQSAQSSFPPSPGPSPDVQLATLAQRVKEVLPHVPLGVIQRDLAKTGCVDLTITNLLEGAVAFMPEDITKGTQSLPTASASKFPRQESLQERKQALYEYARRRFTERRAQEAY

SEQ ID NO: 10753 - protein, 99 aa, Homo sapiens
LVAKELGQTGTRLTPADKAEHMKRQRHPRLRPQSAQSSFPPSPGPSPDVQLATLAQRVKEVLPHVPLGVIQRDLGMGKGGPTLGDGHREEKWVVKEESK

SEQ ID NO: 10754 - protein, 73 aa, Homo sapiens
  misc_feature (1)...(73): Xaa = X or * as defined in Table 2
DCKPVARPSTKAKTDQSGPFLSLLPHRYLSLSLTLRSSSPESMTCWMEGREKEKSASQXVTTTFRASMSSYTA

SEQ ID NO: 10755 - protein, 719 aa, Homo sapiens
  DOMAIN (650)..(668): DEAH-box subfamily ATP-dependent helicases proteins domain identified by eMATRIX, accession number BL00690B, p-value=2.098e- 11, raw score of 13.38
FRPGAPEAAVMELSSWPGPERLFDSHRLPGDCFLLLVLLLYAPVGFCLLVLRLFLGIHVFLVSCALPDSVLRRFVVRTMCAVLGLVARQEDSGLRDHSVRVLISNHVTPFDHNIVNLLTTCSTVSESEADSATVRFPGAQLKAPLSPLAFPMEDTEALPLTPILYPTCQFFFFIFLNIFLLAFSSPGSQPLLNKSPQAFVCWSRGFMEMNGRGELVESLKRFCASTRLPPTPLLLFPEKKATNGREGLLRFSSWPFSIQDVVQPLTLQVQRPLVSVGECVLNRESLGLEGEISHPWPWLRPHLMPSPQTVSDASWVSELLWSLFVPFTVYQLVAKELGQTGTRLTPADKAEHMKRQRHPRLRPQSAQSSFPPSPGPSPDVQIWATLAQRVKEVLPHVGPLGVIQRDLGMGKGGPTLGDGHREEKWVVKEETKTGCVDLTITNLLEGAVAFMPEDITKGTQSLPTASASKFPSSGPVTPQPTALTFAKSSWARQESLQERKQALYEYARRTFPQVTRSHIISTALEDPCLSKISTTCQRGNSLRSCQRATMTSQPLRLAEEYGPSPGESELAVNPFDGLPFSSRYYELLKQRQALPIWAARFTFLEQLESNPTGVVLVSGEPGSGKSTQIPQWCAEFALARGFQKGQVTVTQPYPLAARSLALRVADEMDLTLGHEVGYSIPQEDCTGPNTLLRFCWDRLLLQEVASTRGPGKLGRAGTR

SEQ ID NO: 10756 - protein, 434 aa, Homo sapiens
  DOMAIN (38)..(51): CHOLINESTERASE SIGNATURE domain identified by eMATRIX, accession number PR00878F, p-value=8.843e-09, raw score of 5.37
  DOMAIN (16)..(235): Carboxylesterases domain identified by PFam, accession name COesterase, E-value=1.8e-30, PFam score of 107.0
  misc_feature (1)...(434): Xaa = X or * as defined in Table 2
APCLLGWSLPSRSAKTYAYLFSHPSRMPVYPKWVGADHADDIQYVFGKPFATPTGYRPQDRTVSKAMIAYWTNFAKTGXDVGXVQGGGPQPRRASHHEALFPHLPVEGLWASHLTSPCIGIHVCLRMRVTGRAPSPCTCTASAQYAVRGMVPRASSEGGDGSGVQVESRASAPWESPAPAQPLLTLQDPNMGDSAVPTHWEPYTTENSGYLEITKKMGSSSMKRSLRTNFLRYWTLTYLALPTVTDQEATPVPPTGDSEATPVPPTGDSETAPVPPTGDSGAPPVPPTGDSGAPPVPPTGDSGAPPVPPTGDSGAPPVPPTGDSGAPPVPPTGDSGAPPVPPTGDSGAPPVPPTGDAGPPPVPPTGDSGAPPVPPTGDSGAPPVTPTGDSETAPVPPTGDSGAPPVPPTGDSEAAPVPPTDDSKEAQMPAVIRF

SEQ ID NO: 10757 - protein, 98 aa, Homo sapiens
  misc_feature (1)...(98): Xaa = X or * as defined in Table 2
MKCSQPXRCHFQSDFQKCAPCPRAQTHWLEPPGRVQTISSMRNAQKGFADSIRLWRLPASGVGWVVSPEGAGDPSHLLDPPGHSAPYSPAPRQLSRVP

SEQ ID NO: 10758 - protein, 129 aa, Homo sapiens
MKCSQPPRCHFQSDFQKCAPCPRAQTHWLEPPGRVQTISSMRNAQKGFADSIRLWRLPASGVGWVVSPPIQTQEVAPEGMYLVGSSSGTLGGCRALTQVFLSLSSLGCVCACACACLCFSLWAHQDVSS

SEQ ID NO: 10759 - protein, 3204 aa, Homo sapiens
  DOMAIN (3146)..(3190): Pancreatic trypsin inhibitor (Kunitz) family proteins domain identified by eMATRIX, accession number BL00280, p-value=4.231e-28, raw score of 24.61
  DOMAIN (63)..(2846): von Willebrand factor type A domain identified by PFam, accession name vwa, E-value=0, PFam score of 1894.7
IEEPRDTRLQVCSGVHIWCLDKFKMRKHRHLPLVAVFCLFLSGFPTTHAQQQQADVKNGAAADIIFLVDSSWTIGEEHFQLVREFLYDVVKSLAVGENDFHFALVQFNGNPHTEFLLNTYRTKQEVLSHISNMSYIGGTNQTGKGLEYIMQSHLTKAAGSRAGDGVPQVIVVLTDGHSKDGLALPSAELKSADVNVFAIGVEDADEGALKEIASEPLNMHMFNLENFTSLHDIVGNLVSCVHSSVSPERAGDTETLKDITAQDSADIIFLIDGSNNTGSVNFAVILDFLVNLLEKLPIGTQQIRVGVVQFSDEPRTMFSLDTYSTKAQVLGAVKALGFAGGELANIGLALDFVVENHFTRAGGSRVEEGVPQVLVLISAGPSSDEIRYGVVALKQASVFSFGLGAQAASRAELQHIATDDNLVFTVPEFRSFGDLQEKLLPYIVGVAQRHIVLKPPTIVTQVIEVNKRDIVFLVDGSSALGLANFNAIRDFIAKVIQRLEIGQDLIQVAVAQYADTVRPEFYFNTHPTKREVITAVRKMKPLDGSALYTGSALDFVRNNLFTSSAGYRAAEGIPKLLVLITGGKSLDEISQPAQELKRSSIMAFAIGNKGADQAELEEIAFDSSLVFIPAEFRAAPLQGMLPGLLAPLRTLSGTPEVHSNKRDIIFLLDGSANVGKTNFPYVRDFVMNLVNSLDIGNDNIRVGLVQFSDTPVTEFSLNTYQTKSDILGHLRQLQLQGGSGLNTGSALSYVYANHFTEAGGSRIREHVPQLLLLLTAGQSEDSYLQAANALTRAGILTFCVGASQANKAELEQIAFNPSLVYLMDDFSSLPALPQQLIQPLTTYVSGGVEEVPLAQPESKRDILFLFDGSANLVGQFPVVRDFLYKIIDELNVKPEGTRIAVAQYSDDVKVESRFDEHQSKPEILNLVKRMKIKTGKALNLGYALDYAQRYIFVKSAGSRIEDGVLQFLVLLVAGRSSDRVDGPASNLKQSGVVPFIFQAKNADPAELEQIVLSPAFILAAESLPKIGDLHPQIVNLLKSVHNGAPAPVSGEKDVVFLLDGSEGVRSGFPLLKEFVQRVVESLDVGQDRVRVAVVQYSDRTRPEFYLNSYMNKQDVVNAVRQLTLLGGPTPNTGAALEFVLRNILVSSAGSRITEGVPQLLIVLTADRSGDDVRNPSVVVKRGGAVPIGIGIGNADITEMQTISFIPDFAVAIPTFRQLGTVQQVISERVTQLTREELSRLQPVLQPLPSPGVGGKRDVVFLIDGSQSAGPEFQYVRTLIERLVDYLDVGFDTTRVAVIQFSDDPKAEFLLNAHSSKDEVQNAVQRLRPKGGRQINVGNALEYVSRNIFKRPLGSRIEEGVPQFLVLISSGKSDDEVVVPAVELKQFGVAPFTIARNADQEELVKISLSPEYVFSVSTFRELPSLEQKLLTPITTLTSEQIQKLLASTRYPPPAVESDAADIVFLIDSSEGVRPDGFAHIRDFVSRIVRRLNIGPSKVRVGVVQFSNDVFPEFYLKTYRSQAPVLDAIRRLRLRGGSPLNTGKALEFVARNLFVKSAGSRIEDGVPQHLVLVLGGKSQDDVSRFAQVIRSSGIVSLGVGDRNIDRTELQTITNDPRLVFTVREFRELPNIEERIMNSFGPSAATPAPPGVDTPPPSRPEKKKADIVFLLDGSINFRRDSFQEVLRFVSEIVDTVYEDGDSIQVGLVQYNSDPTDEFFLKDFSTKRQIIDAINKVVYKGGRHANTKVGLEHLRVNHFVPEAGSRLDQRVPQIAFVITGGKSVEDAQDVSLALTQRGVKVFAVGVRNIDSEEVGKIASNSATAFRVGNVQELSELSEQVLETLHDAMHETLCPGVTDAAKACNLDVILGFDGSRDQNVFVAQKGFESKVDAILNRISQMHRVSCSGGRSPTVRVSVVANTPFGPEEAFDFDEYQPEMLEKFRNMRSQHPYVLTEDTLKVYLNKFRQSSPDSVKVVIHFTDGADGDLADLHRASENLRQEGVRALILVGLERVVNLERLMHLEFGRGFMYDRPLRLNLLALGYDQADQLDNIAEKACCGVPCKCSGQRGDRGPIGSIGPKGIPGEDGYRGYPGDEGGPGERGPPGVNGTQGFQGCPGQRGVKGSRGFPGEKGEVGEIGLDGLDGEDGDKGLPGSSGEKGNPGRRGDKGPRGENGERGDVVILGGPGLSYGQDSQERGPGGETGDLGPMGVPGRDGVPGGPGETGKNGGFGRRGPPGAKGNKGGPGQPGFEGEQGTRGAQGPAGPAGPPGLIGEQGISGPRGSGGAAGAPGERGRTGPLGRKGEPGEPGPKGGIGNRGPRGETGDDGRDGVGSEGRRGKKGERGFPGYPGPKGNPGEPGLNGTTGPKGIRGRRGNSGPPGIVGQKGRPGYPGPAGPKGNRGDSIDQCALIQSIKDKCPCCYGPLECPVFPTELAFALDTSEGVNQDTFGRMRDVVLSIVNDLTIAESNCPRGARVAVVTYNNEVTTEIRFADSKRKSVLLDKIKNLQVALTSKQQSLETAMSFVARNTFKRVRNGFLMRKVAVFFSNTPTRASPQLREAVLKLSDAGITPLFLTRQEDRQLINALQINNTAVGHALVLPAGRDLTDFLENVLTCHVCLDICNIDPSCGFGSWRPSFRDRRAAGSDVDIDMAFILDSAETTTLFQFNEMKKYIAYLVRQLDMSPDPKGSQHFARVAVVQHAPSESVDNASMPPVKVEFSLTDYGSKEKLVDFLSRGMTQLQGTRALGSAIEYTIENVFESAPNPRDLKIVVLMLTGEVPEQQLEEAQRVILQAKCKGYFFVVLGIGRKVNIKEVYTFASEPNDVFFKLVDKSTELNEEPLMRFGRLLPSFVSSENAFYLSPDIRKQCDWFQGDQPTKNLVKFGHKQVNVPNNVTSSPTSNPVTTTKPVTTTKPVTTTTKPVTTTTKPVTIINHPFVKPAAAKSPAPAKPVAAKPVATKTATVRPPVAVKPATAAKPVAAKPAAVRPPAAAAAKPVATKPEVPRPQAAKPAATKPATTKPMVKMSREVQVFEITENSAKLHWERPEPPGPYFYDLTVTSAHDQSLVLKQNLTVTDRVIGGLLAGQTYHVAVVCYLRSQVKAIYHGSFSTKKSQPPPPQPARSASSSTINLMVSTEPLALTETDICKLPKDEGTCARDFILKWYYDPNTKSCARFWYGGCGGNENKFGSQKECEKVCAPVLAKPGVISVMGT

SEQ ID NO: 10760 - protein, 165 aa, Homo sapiens
GPQAGSSPEILLPEDNSLIRWAGAGCHTQDSATTVTASWAPLCAGAGREEDGTPCVCLGRSARPKLVFGRPLRTSAALRPGACIPHGLLCYPREPVDFRPGSGRAWPPRSPSPCQDPRPSRSAPGSEPGWCPDPPAPPRLVTLGRASPHLTLPRRAAPPPCRWRP

SEQ ID NO: 10761 - protein, 63 aa, Homo sapiens
  misc_feature (1)...(63): Xaa = X or * as defined in Table 2
XSELESALQMEPAAFQALYSAEKPKLEDEHLVFFCQMGKRGLQAHAAGPESWIHWGSQLRWSL

SEQ ID NO: 10762 - protein, 179 aa, Homo sapiens
  misc_feature (1)...(179): Xaa = X or * as defined in Table 2
FRLVLSPRLEGIGAILAHXNLCLLGSNDSPASATRVAGITGTRHHAPLIFVFLVEMGFRHVGQAGHKLLISGDPPASASQSAGITGVSHARLAALSNFXGLGQVPTPLKQATLLSLLDTSPSLPAIFFLFFFXDRFSSVTQAEVQWGDHCSLHPXPTGLKDPPASASRLGTTRTRHHSR

SEQ ID NO: 10763 - protein, 109 aa, Homo sapiens
GMVIICCLGAPRTQPFQAQLPNLSAKLLAFPSTLSTPPVSELESALQMDQPAFQALYSAEKPKLEDEHLVFFCQMGKRGLQATQLARSLGYTGARNYAGAYREWLEKES

SEQ ID NO: 10764 - protein, 207 aa, Homo sapiens
  DOMAIN (74)..(200): Jacalin-like lectin domain identified by PFam, accession name Jacalin, E-value=1.7e-05, PFam score of 27.0
AGPDSFCNFSVCPSSTSTAWILVLAQFLLSPTLLPSPRMLTVALLALLCASASGNAIQARSSSYSGEYGSGGGKRFSHSGNQLDGPITALRVRVNTYYIVGLQVRYGKVWSDYVGGRNGDLEEIFLHPGESVIQVSGKYKWYLKEAGYLVPTKGPFLSFGKSKGPSFNAVPLHPNTVVRFISGRSGSLIDAIGLHWGCFTHTSCSRC

SEQ ID NO: 10765 - protein, 31 aa, Homo sapiens
AFVSLGLMCFGALIGLCACICRSLYPTIATG

SEQ ID NO: 10766 - protein, 294 aa, Homo sapiens
RGESRVLWSELEGEAGGAGGWASSLNARMDNRFATAFVIACVLSLISTIYMEGSIGTDFWYEYRSPGQENSSDLNKSIWDEFISDEADDATYNDALFRYNGTVGFLRRVYSPYPKTLHWVLAHHERTESFDVVTKCVSFTLTEQFMEKFVDPGKHTNSRGLDLLRTYLWRCQFLLPFVSLGFDVLWGALIGLCACICRSLYPSIATGILHLLAGLCTLGSVSCYVAGIELLHQKLELPDNVSGEFGWSFCLACVSAPLQFMASALFIWAAHTNRKEYTLMKAYRVGMSKKPACF

SEQ ID NO: 10767 - protein, 191 aa, Homo sapiens
IVVHLVPTTQRSGKGKIMELVERSVVARVEVGHRGFLERGLPIAAINDMKKSPEIISGRMTFGKNADLDNWALSASPGGSLQCTRDQEQILQVIRAGTGPDKNQGNSLVQWTFLVLPRREYGEIEASKVIPAGQNLANRTHPNETSVWKCHKEAGSLWNIPFAGLPAASVMEKRWFFPAAEVQALTGGQQQ

SEQ ID NO: 10768 - protein, 117 aa, Homo sapiens
LFKHFWGPVANWGLPIAAINDMKKSPGDYSVGRMTFALCCYSLTFMEILPYKVQPSGTWASCFACHGTNEVRPSFIQGEGRLIPNTRMDLKRASGINQWGKGKNKVFEGDSLCPGCC

SEQ ID NO: 10769 - protein, 55 aa, Homo sapiens
  DOMAIN (38)..(46): Helicases conserved C-terminal domain proteins domain identified by eMATRIX, accession number PF00271, p-value=1.000e-09, raw score of 7.99
SSQPPTLLPAGIDVEQVSVVINFDLPVDKDGNPDNETYLHRIGRTGRFGKRGLAV

SEQ ID NO: 10770 - protein, 150 aa, Homo sapiens
  DOMAIN (124)..(147): DEAD/DEAH box helicase domain identified by PFam, accession name DEAD, E-value=0.0036, PFam score of 12.9
CSGAGAEPAANPRSPRSLVPSLESTSTSVPPAPGTMATDSWALAVDEQEAAAESGAVVKTNANAEKTDEEEKEDRAAQSLLNKLIRSNLVDNTNQVEVLQRDPNSPLYSGKSFEELRLKPQLLQGVYAMGFNQPSKIQENALPLMLAEPY

SEQ ID NO: 10771 - protein, 62 aa, Homo sapiens
WFPVPISAEPAANLWSPRFLVPSLECTSTSVPPAPGTMATDSWALAVDEQEAAAESVSWLQP

SEQ ID NO: 10772 - protein, 86 aa, Homo sapiens
  DOMAIN (17)..(43): DEAD-box subfamily ATP-dependent helicases proteins domain identified by eMATRIX, accession number BL00039B, p-value=6.442e- 12, raw score of 19.19
  misc_feature (1)...(86): Xaa = X or * as defined in Table 2
SSANNISILGAFRSVTKWLSXTHPLXFFCQCLCLSPTYELALQTGKVIEQMGKFYPELKLAYAVRGNKCEYGRRQLNSEQGRGLGV

SEQ ID NO: 10773 - protein, 227 aa, Homo sapiens
  misc_feature (1)...(227): Xaa = X or * as defined in Table 2
LCASLRLLPAPPMLSLSHRISPHPWPGVHYGCXGGRSGSDIGSCRETGLCRGFSPGCIKTSTSPWAPAGXAPSTGPSGQETCTAHSPFIPAPAXAQGLKFXGVTESICAGAAGTAGGTETAVSAGSPAGQAQPGPGAGQSLSAGSQMAXGSDHPGPIWQTCXSVQGAFALDGXGGXLHPHPPXGPATLPEGGGGVCPAAKNASGATREVPAVLQAVHAPGATWLRPP

SEQ ID NO: 10774 - protein, 871 aa, Homo sapiens
  DOMAIN (517)..(572): Sialyltransferase family domain identified by eMATRIX, accession number PF00777C, p-value=3.719e-17, raw score of 18.60
  DOMAIN (559)..(618): DEAD/DEAH box helicase domain identified by PFam, accession name DEAD, E-value=1.9e-14, PFam score of 48.6
MPSQTRKTASWLAAELSKEGHQVALLSGEMMVEQRAAVIERFREGKEKVLVTTNVCARGVKLQTFTVRVTALKVVRRELLVPLGGLLVLLASRLEAVDLCAYVSSGSYSYMTSSASEFLLSLTLPGAPGAQIVHSQVEEQQLLAAGSSVVSCLLEACPLGPGNVLQHCHLLVKPERVGTLGLGMATLPYLDSGALDGTHRVKLVPGYAGLQRLSKERLSGKSCACRRCMGDAGASDWFDSHFDGNISPVWTRENMDLPPDVQRWWMGFFFVPRMKPKGSSWSTAPSISWAKVLFLLQLLKKLGYRMNQAPTVGFEQDVGSRTTHHFMYPESAKNLPANVSFVLVPFKVLDLLWIASALSTGQIRFSCIQGLSGSVFKKRSCPSICGHKASREWNEHIAVRTLFWRQGAGTYLNVPWSEFFKRTGVRAIINYPTQGPSLKEDTGVLAANTNSRGYHVIKSMSKSVLALTLHTKMLCRQGDRMLQPQFKSHNTNEVLEKLFQIVPGENPYRFRDPPPCRRCAVVGNSGNLRGSGYGQDVDGHNFIMRLPFCLQGTLVEYGISPALPQNLIAQSQSGTGKTAAFVLAMLSRVEPSDRYPQCLCLSPTYELALQTGKVIEQMGKFYPELKLAYAVRGNKSGYWGPMFTLPSRILPLPSTLGPVSTRSVGEEALTRECQSQKCVSAARTSRMELTAVSTKSYNIRISDYHPIFHISRIRTIRRFTLSRYSPFLEIPQFPNLHLHTIPMYAVLRIHRVTIWVSAITKYRYPNYLNPNEWIPIFHTSRLRLPNTLYTYPVHIAVSNSPFVSHFLKPSTVHIRFADPNSLSPLSFTIPFRHSNTFRIPLPNNKQFQVTISVPVSESGAMTSLHLERNFQ

SEQ ID NO: 10775 - protein, 182 aa, Homo sapiens
LCSSRDEKFKALCNLPGAITMAQAMIFCHTRKTASWLAAELSKEGHQVALLSGEMMVEQRAAVIERFREGKEKVLVTTNVCARGEQRTCPTWSARLGVPGPIRARNPCIQGSRMVSGRWVGLVTLFLSRRDCLDFPEVVRTHTCQVRWLMPAIPRQENCLNPGDRGCSEPRMCYSTPSWVTE

SEQ ID NO: 10776 - protein, 517 aa, Homo sapiens
  DOMAIN (426)..(472): DEAD-box subfamily ATP-dependent helicases proteins domain identified by eMATRIX, accession number BL00039D, p-value=5.869e- 18, raw score of 21.67
  DOMAIN (143)..(356): DEAD/DEAH box helicase domain identified by PFam, accession name DEAD, E-value=4.8e-26, PFam score of 85.2
CRGAGAEPAANPRSPRSLVPSLEYTSTSVPPAPGTMATDSWALAVDEQEAAAESLSNLHLKEEKIKPDTNGAVVKTNANAEKTDEEEKEDRAAQSLLNKLIRSNLVDNTNQVEVLQRDPNSPLYSVKSFEELWLKPQLSQGVYAMGFNRPSKIQENALPLMLAEPPQNLIAQSQSGTGKTSLPLVLAMLSRVEPIRPDTPQCLCLFPTYEAGGFKQGKVIEQMGKFYPELKLAYAVRGNKLERGQKISEQIVIGTPGTVGLNWCFQLKFIDPKKIKVFVLDEADVMIATQGHQDQSIRIQRMLPRNCQMLLFSATFEDSVWKFAQKVVPDPNVIKLKREEETLDTIKQYYVLCSSRDEKFQALCNLYGAITIAQAMIFCHTRKTASWLAAELSKEGHQVVMLSGEMMVEQRAAVIERFREGKEKVLVTTPNLCSRGIDVDQVSVVINFDLPVDKDGNPDNETYLHRIGRTARFGKRGLAVNMVDSKHSMNILNRIQEHFNKKIERLDTDDLDEIEEN

SEQ ID NO: 10777 - protein, 139 aa, Homo sapiens
QNTIDNMSLLGPKVLLFLAAFIITSDWIPLGVNSQRGDDVTQATPETFTEDPNLVNDPATDETVLAVLADIAPSTDDLECWDEKFTCTRLYSVHRPAKQCIHQLCFTGLRRMYIVNKEICSCLGWKEHEAMKEELCRSK

SEQ ID NO: 10778 - protein, 75 aa, Homo sapiens
RLLCIFFLLYLSFPIPSILHLCCFYLDLLIFLYWASSECWDEKFTCTRLYSVHRPVKQCIHQLCFTSLRRMYIVN

SEQ ID NO: 10779 - protein, 211 aa, Homo sapiens
APAKVRTAQEDRDTFSSQRTRWKEQNTIDNMALLGPKGLLFLAAFIITSDWIPLGVNSQRGDDVTQATPETFTEDPNLVNDPATDETVLAVLADIAPSTDDLASLSEKNTTAECWDEKFTCTRLYSCASGPVNQMHFIQLCFHPVLRRMYIVQPREICSSVLVCKGTPKPMKDELCRQMAGLPPLGRLRRPQLLPDFPPCENVDLQRPNGL

SEQ ID NO: 10780 - protein, 96 aa, Homo sapiens
  misc_feature (1)...(96): Xaa = X or * as defined in Table 2
SLEVSLGDHFQKCRFLEKRERFWKGMFSFCSMAVSGFLAAGAGLKPRSGWHXVFHSPRRSWTENFKFQRDEVSASPLGAWRALTKEKGGAQPLEGL

SEQ ID NO: 10781 - protein, 87 aa, Homo sapiens
  misc_feature (1)...(87): Xaa = X or * as defined in Table 2
MVGPSLHAGXXXVYIPRFLYIRSWLPCIFFSGGVTVGNIGRQLAMGVPEKPIVIESSKPXILESXGRFLEENLXLVDYXKGLSFFLK

SEQ ID NO: 10782 - protein, 73 aa, Homo sapiens
PMPRSGLGLGITIAFLATLITQFLVYNGVYQYTSPDFLYIRSWLPCIFFSGGVTVGNIGRQLAMGVPEKPHSD

SEQ ID NO: 10783 - protein, 150 aa, Homo sapiens
GRVGGRVGLSLTLAALSLGLWWTFDRSRSGLGLGITIAFLATLITQFLGYNGVYQYTSPDFLYIRSWLPCIFFSGGVTVGNIGRQLAMLIPFCEELNLKTTWLFHKTRSNYRVFLKSPIVIESSKPPILRARKILEENLTVDYDQDYLFS

SEQ ID NO: 10784 - protein, 280 aa, Homo sapiens
PMPRLHDHFWSCSCAHSARRRGPPRAIAAGLAAKVGEMIIVFVSGPSLMAVLSASDADPAPRGRSAVKSGPYPGSPYPNTWHHSLMQKSLVLFSVGEVLALVLNLLQIQRNVTLFPEEVIATIFSSAWWVPPCCGTAPADVGLLYPCIDSHLGEPHKFKERMGQVSMRCIAVFVGINHASAKLDFANNVQLSLTLAALSLGLWWTFDRSRSGLGLGITIAFLATLITQFLVYNGVYQYTSPDFLYIRSWLPCIFFSGSVTVGNIGRQLGYGVFLEKPHSD

SEQ ID NO: 10785 - protein, 89 aa, Homo sapiens
RIFSMTSGRLRWRCTWRPATALWSASLRLGTSSMHPSPRSISLPPVHVHTHNSGKEVLGLQVQRSRSGTGPACSQAGSGAVQGGNWCIF

SEQ ID NO: 10786 - protein, 74 aa, Homo sapiens
RIFSMTSGRLRWRCTWRPATALWSASLRLGTSSMHPSPRSISLPLSMMLSPLPSNTRGLSPTALFRPHSLSPQM

SEQ ID NO: 10787 - protein, 149 aa, Homo sapiens
RIFSMTSGRLRWRCTWRPATALWSASLRLGTSSMHPSPRSISLPLSMMLSPLPSNTRGLSPTALVRSPNSEHATSCPRLHLWRCRAPLRSPSPLGRLPGATPGVPSHVHTHNSGKEVLGLQVQRSRSGTGPACSQAGSGAVQGGNWCIF

SEQ ID NO: 10788 - protein, 114 aa, Homo sapiens
  DOMAIN (7)..(114): KE2 family protein domain identified by PFam, accession name KE2, E-value=2.5e-16, PFam score of 67.7
AFIPAMAELIQKKLQGEVEKYQQLQKDLSKSMSGRQKLEAQLTENNIVKEVRDWDLWGEEGPVLAMVLITYVPSLHQELALLDGSNVVFKLLGPVLVKQELGEARATVGKRLDY

SEQ ID NO: 10789 - protein, 61 aa, Homo sapiens
  misc_feature (1)...(61): Xaa = X or * as defined in Table 2
QIRETSGTGTXYTSASQSAGIIEVSHHARQMFQFYSQKYTLPNCCKLXILMFKIKFFLTQK

SEQ ID NO: 10790 - protein, 92 aa, Homo sapiens
  DOMAIN (7)..(82): KE2 family protein domain identified by PFam, accession name KE2, E-value=2.1e-14, PFam score of 61.3
AFIPAMAELIQKKLQGEVEKYQQLQKDLSKSMSGRQKLEAQLTENNIVKEKRYESQLRDLERQSEQQRETLAQLQQEFQRAQAAKAGAPGKA

SEQ ID NO: 10791 - protein, 286 aa, Homo sapiens
  DOMAIN (62)..(165): KE2 family protein domain identified by PFam, accession name KE2, E-value=1.6e-05, PFam score of 23.4
  misc_feature (1)...(286): Xaa = X or * as defined in Table 2
GLLPHLGPRVQRLPRLSLSTLACGLTRGPHPFLLPQIHIHLTRIVGIGGTFDVSKLPFLSSPDLSKSMSGRQKLEAQLTEYNIAKEVRDWDLWGEEGPVLAMVLITYVPSLHQELALLDGSNVVFKLLGPVLVKQELGEARATVGKRLDYITAEMXVFIPPPCAAPCDASEPLEXRCXTIAEQLSIVAPSPPVPPTLSFPFXPPFFSLPWISRFSTYLFLAFSTLHSESYXFLPFCLSPLSLLSKRYESQLRDLERQSEQQRETLAQLQQEFQRAQAAKAGAPGKA

SEQ ID NO: 10792 - protein, 134 aa, Homo sapiens
  DOMAIN (7)..(127): KE2 family protein domain identified by PFam, accession name KE2, E-value=4.7e-51, PFam score of 183.0
AFIPAMAELIQKKLQGEVEKYQQLQKDLSKSMSGRQKLEAQLTENNIVKEELALLDGSNVVFKLLGPVLVKQELGEARATVGKRLDYITAEIKRYESQLRDLERQSEQQRETLAQLQQEFQRAQAAKAGAPGKA

SEQ ID NO: 10793 - protein, 87 aa, Homo sapiens
GARGEGKTYGAGVALEAGDSDSGSRGGLSHHRAKLSSLQQLPTPPPLHELNYNAANSQSSREEPPEVVESATQKSLLDHRGTVTSGS

SEQ ID NO: 10794 - protein, 153 aa, Homo sapiens
  DOMAIN (48)..(77): Enhancer of rudimentary proteins domain identified by eMATRIX, accession number BL01290A, p-value=8.650e-34, raw score of 11.13
  DOMAIN (28)..(142): Enhancer of rudimentary domain identified by PFam, accession name ER, E-value=3e-38, PFam score of 140.5
ARVTAAVSAAAVAKRVWRDGFDCSGYYSLTTILLVQPTKRPEGRTYADYESVNECMEGVCKMYEEHLKRMNPNGPSITHNTTSQLFDFIDDLADLSCLVYRADTQTYQPYNKDWIKDEDPTVLLSSGKAQQAREIIVVGSHWGGWGGAWDTGV

SEQ ID NO: 10795 - protein, 44 aa, Homo sapiens
  DOMAIN (1)..(43): Ribosomal L38e protein family domain identified by PFam, accession name Ribosomal_L38e, E-value=6.6e-20, PFam score of 79.6
KNKDNVKFKVRCSRYLYTLVITDKEKAEKLKQSLPPGLAVKELK

SEQ ID NO: 10796 - protein, 89 aa, Homo sapiens
  DOMAIN (24)..(89): Ribosomal L38e protein family domain identified by PFam, accession name Ribosomal_L38e, E-value=1.2e-10, PFam score of 48.8
RRGLFPAGPGPRQEPSRASSPMPSERLRNIKDFLLTARRKDAKSVKIKKNKDNVKFKVRCSRYLLHPWSSPDKEKAEKLKQSLPPRFGK

SEQ ID NO: 10797 - protein, 217 aa, Homo sapiens
  misc_feature (1)...(217): Xaa = X or * as defined in Table 2
QCXDPETSETVXEKLRAGRHQRCCHGGQSCFDKSATRALPPPRKWRHRGTRCAATKRTRLGEMAVLGPXEXRQPEEFPRTTSILAEPTVLSRRKCRPSEKRGSATEKFGATSAVTENPPLGAAGERANKTLRCCHRDTDFRTPASDGERRRSHTEGPINRSLAMRMGKGGSIGTENRADWAGPGCKVCESCSRVLHLCVYGSHHRIWHMEGYQHMLV

SEQ ID NO: 10798 - protein, 51 aa, Homo sapiens
ISLTGEELWHLLRSTSLGIASPPMHEVPFLEVDGDRTKTQVFPLTNLRRAC

SEQ ID NO: 10799 - protein, 96 aa, Homo sapiens
NVVECLFKDALPQLSADRFLASSILLGDLGVEEVHFSVSNLTGEELWHLLRSTSLGIASPPIHEVPFLEVDGDRTKTQVFPLTNLHVRAHASAHAS

SEQ ID NO: 10800 - protein, 263 aa, Homo sapiens
  DOMAIN (246)..(260): TYPE II ANTIFREEZE PROTEIN SIGNATURE domain identified by eMATRIX, accession number PR00356G, p-value=9.262e-12, raw score of 10.80
  DOMAIN (169)..(263): Lectin C-type domain identified by PFam, accession name lectin_c, E-value=1.9e-16, PFam score of 68.1
LRLTFPEFSHTKVRTMSLFPSLPLLLLSMVAASYSETVTCEDAQKTCPAVIACSSPGINGFPGKDGRDGTKGEKGEPGQGLRGLQGPPGKLGPPGNPGPSGSPGPKGQKGDPGKSPDGDSSQAASERKALQTEMARIKKWLTFSLGKQVGNKFFLTNGEIMTFEKVKALCVKFQASVATPRNAAENGAIQNLIKEEAFLGMPDEKTEGQFVDLTGNRLTYTNWNEGEPNNAGSDEDCVLLLKNGQWNDSPCSTSHLAVCEFPI

SEQ ID NO: 10801 - protein, 108 aa, Homo sapiens
CLSPSNPPCWGFLEDYAFVVRGLLDLYEASQESAWLEWALRLQDTQDRLFWDSQGGGYFCSEAELGAGLPLRLKDDQDGAEPSANSVSPQPAQVPITDPCELRKLLHP

SEQ ID NO: 10802 - protein, 176 aa, Homo sapiens
EFVPHSEKMLYDQAQLAVAYLYAFQLSGDEFYSDVAKGILQYVARSLSHRSGGFYSAEDADSPPERGQRPKEGAYYVWTVKEVQQLLPEPVLGATEPLTSGQLLMKHYCLTEAGNISPSQDPKGETCRARMLLDRPVLRWELTAARFGLDVEKAVRTLLNTGLEKLFQARKHRPKP

SEQ ID NO: 10803 - protein, 132 aa, Homo sapiens
KCVCLLTAFSERMRRVPVALPEMVRALSAQQQTLKQIVIVWRPSGQRTPKALVQCVHSVYIPNKVLILADGDPSSFLSRQLPFLSTLRRLEDQATAYVCENQACSVPITDPCELRKLLHPLTCPYPLGWGRR

SEQ ID NO: 10804 - protein, 745 aa, Homo sapiens
NVAAMLGARAWLVRVLLLPRAGAGLAASRRGSSSRDKDRSATVSSSVPMPAGGKGSHPSSTPQRVPNRLIHEKSPYLLQHAYNPVDWYPWGQEAFDKARKENKPIFLSVGYSTCHWCHMMEEESFQNEEIGRLLSEDFVSVKVDREERPDVDKVYMTFVQATSSGGGWPMNVWLTPNLQPCVGGTYFPPEDGLTRVGFRTVLLRIREQWKQNKNTLLENSQRVTTALLARSEISVGDRQLPPSAATVNNRCFQQLDEGYDEEYGGFAEAPKFPTPVILSFLFSYWLSHRLTQDGSRAQQMALHTLKMMANGGIRDHVGQGFHRYSTDRQWHVPHFEKMLYDQAQLAVAYSQAFQLSGDEFYSDVAKGILQYVARSLSHRSGGFYSAEDADSPPERGQRPKEGAYYVWTVKEVQQLLPEPVLGATEPLTSGQLLMKHYGLTEAGNISPSQACELADKGHSPQDPKGELQGQNVLTVRYSLELTAARFGLDVEAVRTLLNSGLEKLFQARKHRPKPHLDSKMLAAWNGLMVSGYAVTGAVLGPRQLINYATNGAKFLKRHMFDVASGRLDADLLHRHLGGLWSTATPPCWGFLEDYAFVVRGLLDLYEASQESAWLEWALRLQDTQDRLFWDSQGGGYFCSEADWGAGLPLRLKDAQDEAEPSANSVSAHNLLRLHGFTGHKDWMDKCVCLLTAFSERMRRVPVALPEMVRALSAQQQTLKQIVICGDRQAKDTKALGAVRPLCLHS

SEQ ID NO: 10805 - protein, 61 aa, Homo sapiens
NTFYWERSWFFQAHILPKCKWLFLQSGSRIVSFSWMVGSRSILPWIPCFGLLDLQMEVVTL

SEQ ID NO: 10806 - protein, 70 aa, Homo sapiens
GFTSFISRLSCLSFCLLLETCPVTCWCWEAPRCNQKCTDPAARRPDPQTCASQDRLRCAPCTCHQPLASR

SEQ ID NO: 10807 - protein, 66 aa, Homo sapiens
MCFQRKSYFHIQTLYCPLICISALRYSTGPAPAMWKCHTAPVQKDWLTPLPITLISSPNFLTLINL

SEQ ID NO: 10808 - protein, 160 aa, Homo sapiens
  misc_feature (1)...(160): Xaa = X or * as defined in Table 2
RYKLLSYRKPETAIEQKENIPFQNLSRFSKNLHFWKXSPKETSRLYHECLQLNSSCLILTLAYPVQIICHLFLDEPGRMSDQRRAQNVPEMGFHHVGQACLNLSTSDRPASASQSARIIEVSHHARQMFQFYSQKYTLPNCCKLXILMFKIKFFLTQKQN

SEQ ID NO: 10809 - protein, 50 aa, Homo sapiens
  misc_feature (1)...(50): Xaa = X or * as defined in Table 2
MEVXXXXXXXXXXXXXXXXXXXXXXXXXXXXXXXXXXXXXXXGRLLFGPL

SEQ ID NO: 10810 - protein, 20 aa, Homo sapiens
KEPDLEPPWILIGELPSVWI

SEQ ID NO: 10811 - protein, 86 aa, Homo sapiens
KFSLIKLRKENFPTARICRLVYPLYPLKIFIFPKALNFCREVGPICPPPKKGSFPKIPKVAFNRPPLRKKIIPSQPALNWGPPRVP

SEQ ID NO: 10812 - protein, 65 aa, Homo sapiens
  DOMAIN (32)..(59): Protamine P1 proteins domain identified by eMATRIX, accession number BL00048, p-value=9.031e-13, raw score of 6.39
GRVGSDSCQRQQQGDTKRRRLSSYPWRRRQRWRRRRTSSRRKPQFLRQRQRPRQARRRWRATRFA

SEQ ID NO: 10813 - protein, 138 aa, Homo sapiens
  DOMAIN (97)..(116): GASTRIN RECEPTOR SIGNATURE domain identified by eMATRIX, accession number PR00527F, p-value=9.156e-09, raw score of 10.96
EKAVVTSAASSLVYTVYTAQPAPRSFHPFCSTWSAKEPNTTAGEGGSTNECQCLSACPGANCPGLGTLKSPQNCPSSSLPRPPLPACRGSYESVWARLLQSVHAIGQRRLRESWSPKLYWVHPPQEVVGAFRTFLFLV

SEQ ID NO: 10814 - protein, 109 aa, Homo sapiens
  DOMAIN (51)..(99): Small cytokines (intercrine/chemokine) C-x-C subfamily signat domain identified by eMATRIX, accession number BL00471, p-value= 6.657e-30, raw score of 23.92
  DOMAIN (33)..(103): Small cytokines (intecrine/chemokine), inter domain identified by PFam, accession name IL8, E-value=9.3e-23, PFam score of 80.3
AYSRGTSSLSTMNQTAILICCLIFLTLSGIQGVPLSRTVRCTCISISNQPVNPRSLEKLEIIPASQFCPRVEIIATMKKKGEKRCLNPESKAIKNLLKAVSKERSKRSP

SEQ ID NO: 10815 - protein, 82 aa, Homo sapiens
  DOMAIN (1)..(82): Ubiquitin-conjugating enzyme domain identified by PFam, accession name UQ_con, E-value=0.0004, PFam score of -28.8
  misc_feature (1)...(82): Xaa = X or * as defined in Table 2
MSGIALSRLAQERKAWRKDHPFGFVAVPTKNPDGTMNLMNWECAIPGKKGTPWEGGLFKLRMLFKDDYPSSXPKCKFEPPLF

SEQ ID NO: 10816 - protein, 87 aa, Homo sapiens
  DOMAIN (28)..(50): Globins profile domain identified by eMATRIX, accession number BL01033A, p-value=4.857e-17, raw score of 16.94
  DOMAIN (29)..(76): Globin domain identified by PFam, accession name globin, E- value=6e-06, PFam score of 25.2
MVAVSCRQRPTSRPAWGKVGAHAVRSMCAEALERMFLSFPTTKTYFPHFDLSHGFCPGLRATGKKVADALTNAVAHVGRHAQRRCPP

SEQ ID NO: 10817 - protein, 368 aa, Homo sapiens
  DOMAIN (165)..(203): 2 POLY-IG RECEPTOR domain identified by eMATRIX, accession number DM01688H, p-value=3.727e-10, raw score of 14.31
  DOMAIN (191)..(276): Immunoglobulin domain identified by PFam, accession name ig, E-value=1.7e-05, PFam score of 22.7
  misc_feature (1)...(368): Xaa = X or * as defined in Table 2
MTLEATHLLLRVLLVLLASGGSLFQSPPVKSIILGVAVTVVLLLLLLALLINRYLQKARGRARKPYTEDVSVDKKTETWEWARGEGESYHVYDDVQKEKTTDRMIRSSSMCVHKINTSVSMCAQETPNSSKKAKLGQKIPVQGKDEILHKALCFCPWLGKGGMEPLRLLILLFVTELSGAHNTTVFQGVAGQSLQVSCPYDSMKHWGRRKAWCRQLGEKGPCQRVVSSTTCGLLSFLRRWNWEHSHSQTIPWGGTLTITLRNLQPHDAGLYQCQSLHGSEADTLRKVLVEVLADPLDHRDAGDLWFPGDLRASRMPMWSTASPGLRAREGRXWEEKPRRSPTRDQPSLHTCHLATRTPCSALARDYSA

SEQ ID NO: 10818 - protein, 209 aa, Homo sapiens
  DOMAIN (57)..(105): Ubiquitin-conjugating enzymes proteins domain identified by eMATRIX, accession number BL00183, p-value=2.440e-20, raw score of 28.97
  DOMAIN (8)..(162): Ubiquitin-conjugating enzyme domain identified by PFam, accession name UQ_con, E-value=6.7e-50, PFam score of 179.2
RVPGTLNMSGIALSRLAQERKAWRKDHPFGFVAVPTKNPDGTMNLMNWECAIPGKKGTPWEGGLFKLRMLFKDEYPSSPPKCKFGPPLFPPNCVTSGASCLSFLEEDKDWRPAITIKQILLGIQELLNEPNIQDPAQAEAYTIYCQNRVEYEKRVRAQAKKFAPSCRSSLEPSRTWAVLLLSLRPQVSISVLRHFLCVYMAFCLCCCLE

SEQ ID NO: 10819 - protein, 271 aa, Homo sapiens
  DOMAIN (51)..(99): Ubiquitin-conjugating enzymes proteins domain identified by eMATRIX, accession number BL00183, p-value=7.231e-19, raw score of 28.97
  DOMAIN (6)..(176): Ubiquitin-conjugating enzyme domain identified by PFam, accession name UQ_con, E-value=0.009, PFam score of -47.1
TCQGIALSRLAQEYKAWRKDHPFGYNAVPTKNPDGTMNLMNWECAIPGKKGTPWEGGLFKLRMLFKDDYPSSPPKCKFEPPLFSPRIVYPSGAKCACPSLEEDQRTWRPSPFTIQTRFLLRNYRNFLKWNPNIQDPSFQAEAYTIYCQNRVESYEKRVPSTKPRKFCAPHKQRPCGNRQKERDWFGQELVYNIFCKSKVCSHTMTSHLGGVGRAPSSHCPPRGVRSRIRLNCPVSIQGSSFLRCFCIFGLLCKTRLFILILMSSISTAVKL

SEQ ID NO: 10820 - protein, 43 aa, Homo sapiens
  misc_feature (1)...(43): Xaa = X or * as defined in Table 2
KQEPQIPCQGGKDAAVLQGSQPSLAGIRTTRLRDPSKKWPKGX

SEQ ID NO: 10821 - protein, 268 aa, Homo sapiens
TPPFLAMAPALLLIPAALASFILAFGTGVEFVRFTSLRPLLGGIPESGGPDARQGWLAALQDRSILAPLAWDLGLLLLFVGQHSLMAAERVKAWTSRYFGVLQRSLYVACTALALQLVMRYWEPIPKGPVLWEARAEPWATWVPLLCFVLHVISWLLIFSIFLVFDYAELMGLKQVYYHVLGLGEPLALKSPRALRLFSHLRHPVCVELLTVLWVVPTLGTDRLLLAFLLTLYLGLAHGLDQQDLRYLRAQLQRKLHLLSRPQDGEAE

SEQ ID NO: 10822 - protein, 500 aa, Homo sapiens
  DOMAIN (26)..(118): PTB domain (IRS-1 type) domain identified by PFam, accession name IRS, E-value=1.9e-48, PFam score of 174.4
GQAGCSDTMGSCCSCLNRDSVPDNHPTKFKVTNVDDEGVELGSGVMELTQSELVLHLHRREAVRWPYLCLRRYGYDSNLFSFESGRRCQTGHGIFAFKCSRAEEIFNLLQDLMQCNSINVMEEPVIITRNSHPAELDLPRAPQPPNALGYNVSSFSNGCPGEGPRFSAPQRLSTSSLRHPSLGEESTHALIAPDEQSHTYVNTPASEDDHRRGRHCLQPLPEGQAPFLPQARGPDQRDPQVFLQPGQVKFVLGPTPARRHMVKCQGLCPSLHDPPHHNNNNEAPSECPAQPKCTYENVTGGLWRGAGWRLSPEEPGWNGLAHRRAALLHYENLPPLPPVWESQAQQLGGEAGDDGDSRDGLTPSSNGFPDGEEDETPLQKPTSTRAAIRSHGSFPVPLTRRRGSPRVFNFDFRRPGPEPPRQLNYIQVKLKGWGGDRPKGPQNPSSPQAPMPTTHPARSSDSYAVIDLKKTVAMSNLQRALPRDDGTARKTRHNSTDLPL

SEQ ID NO: 10823 - protein, 235 aa, Homo sapiens
PAILSPNLDDLNFSVRASVPTLAPSAPSASSSPARIPAATRQGRRSPRIPPAPSNEASPAPGRPRVPGAAPPRFPKPTIQASGADRAVDCGILKLQKSPARLARPRWPRRPSKRFWSAAGSVEEQPKPPKAPPAKSPEQSPQLSVLPLATITPQAYGASFEKMKNLKTRRGGRSRWHFPFNVIPQAPSLKWGFQTSDASSAEVFHVDRSLASHKMGPGRRPRSPLWAPPFWNPRH

SEQ ID NO: 10824 - protein, 77 aa, Homo sapiens
  DOMAIN (40)..(74): kw TRANSCRIPTASE REVERSE II ORF2 domain identified by eMATRIX, accession number DM01354P, p-value=3.406e-13, raw score of 9.18
SLPKKKNPDLHGFVGKFYQTFKEKIPASSSSNKFPQDIYEASITLIPKPDQDFRKKENCSSVSLIIFPEIINKILEN

SEQ ID NO: 10825 - protein, 81 aa, Homo sapiens
DQASSGNGVTMIARRNPDTLRFLPDEARSLPPPKLTDPRLLYIGFLGYCSGLIDNVIRRRPIATADKKTYGEIFEKFHPIR

SEQ ID NO: 10826 - protein, 30 aa, Homo sapiens
  misc_feature (1)...(30): Xaa = X or * as defined in Table 2
STCLGLPRCWNYRREQPRLVYMXFVHLYYF

SEQ ID NO: 10827 - protein, 146 aa, Homo sapiens
DQASSGNGVTMIARRNPEPLRFLPDEARSLPPPKLTDPRLLYIGFLGYCSGLIDNVIRRRPIATAGLHRQLLYINGLFFLLGYYLVKREDYLYAVRDREMFGIYGNLHPEDFFLKEDKKTYGEIFLKNSHPHTLKVLQKCLAPSFH

SEQ ID NO: 10828 - protein, 436 aa, Homo sapiens
  misc_feature (1)...(436): Xaa = X or * as defined in Table 2
EQQDLQDPLEVFHPTVEAAEALHIQEPPGGEPSQPTQLPGGAPNTRPPHPQGALWSVXRAPEQELHQDGRQPTGXQWLRTCSLGWPEAQLPAHLIGQADWPSQRPPXDPEXTPPRPQQNPGPSNWRTCFATPSCTGWAXATTQIRMIENGKPELPGPPSGEVPLGQQQVGPGVPSGFPGPQAPPGGLILHSNNIHQSGVFNEFLFPWGFGGEAGPYYNGHSASSTTPCPTGRCKPATFRRRHXPPGHPVWATTKSRGMTAATAGPQWGSLGNTARHPDGEAEPGSXARAQLASNPAPHLRVPXPQLRLPHSPPFPWVPKGCRWTQRPEGMTCYAWAHELRPALPPQPPRGTPXSFFLVHSPACPAQALPPNLYCPGGGWEVEAQHPAQMTPVFLEAPHPHWPTGGXVSPYPSGPAQGGAASEVGGCLSIKETPCNV

SEQ ID NO: 10829 - protein, 316 aa, Homo sapiens
  DOMAIN (163)..(189): G-protein coupled receptors family 2 proteins domain identified by eMATRIX, accession number BL00649C, p-value=9.321e- 14, raw score of 17.82
  DOMAIN (97)..(296): 7 transmembrane receptor (Secretin family) domain identified by PFam, accession name 7tm_2, E-value=6.2e-36, PFam score of 132.8
MDKKDQVYLNSQVVSAAIGPKRNVSLSKSVTLTFQHVKMTPSTKKVFCVYWKSTGQGSQWSRDGCFLIHVNKSHTMCNCSHLSSFAVLMALTSQEEDPVLTVITYVGLSVSLLCLLLAALTFLLCKAIRNTSTSLHLQLSLCLFLAHLLFLVGIDRTEPKVLCSIIAGALHYLYLAAFTWMLLEGVHLFLTARNLTVVNYSSINRLMKWIMFPVGYGVPAVTVAISAASWPHLYGTADRMLAFKATAQLFILGCTWCLGLLQVGPAAQVMAYLFTIINSLQGFFIFLVYCLLSQQAKHKFTPMEVPRQNHRCLQQN

SEQ ID NO: 10830 - protein, 463 aa, Homo sapiens
  DOMAIN (228)..(254): G-protein coupled receptors family 2 proteins domain identified by eMATRIX, accession number BL00649C, p-value=5.959e- 15, raw score of 17.82
  DOMAIN (162)..(418): 7 transmembrane receptor (Secretin family) domain identified by PFam, accession name 7tm_2, E-value=2.4e-65, PFam score of 230.5
AIETQAITDNCSEERKTFNLNVQMNSMDIRCSDIIQGDTQGPSVIAFISYSSLGNIINATFFEEMDKKDQVYLNSQVVSAAIGPKRNVSLSKSVTLTFQHVKMTPSTKKVFCVYWKSTGAGCSQWSRDGCFLIHVNKSHTMCNCSHLSSFAVLMALTSQEEDPVLTVITYVGLSVSLLCLLLAALTFLLCKAIQNTSTSLHLQLSLCLFLAHLLFLVAIDQTGHKVLCSIIAGTLHYLYLATLTWMLLEALYLFLTARNLTVVNYSSINRFMKKLMFPVGYGVPAVTVAISAASRPHLYGTADRCWLHLDQGFMWSFLGPVCAIFSANLVLFILVFWILKRKLSSLNSEVSTIQNTRMLAFKATAQLFILGCTWCLGLLQVGPAAQVMAYLFTIINSLQGFFIFLVYCLLSAQQVQKQYQKWFREIVKSKSESETYTLSSKMGPDSKPSEGDVFPRTSEEKIL

SEQ ID NO: 10831 - protein, 148 aa, Homo sapiens
FFFFFFVRQDLALSPRLECNGIIFAHCNLCLPDSSDPPTSAFQVARTTGRNYYAQLILYFFVETEFAMLTRAGLNLLSSRGPLASASQSVGDYRNSHHAQLIFCIFGRDRVSLWCPEWSQTPEFKRSACLPKCWDYRGEPPHPVPSAL

SEQ ID NO: 10832 - protein, 1966 aa, Homo sapiens
  DOMAIN (424)..(439): WILM'S TUMOUR PROTEIN SIGNATURE domain identified by eMATRIX, accession number PR00049D, p-value=9.000e-14, raw score of 0.00
MAFVATQGATVVDQTTLMKKYLQFVAALTDVNTQHIIPRFLTFLQDGEVQFLQEKPAQQLRKLVLEIIHRIPTNEHLRPHTKNVLSVMFRFLETENEENVLICLRIIIELHKQFRPPITQENRYFENPQVIPENTVPPPEMVGMITTIAVKVNPEREDSETRTLYKLNIHNVVAEFVPLIMNTIAIQVSAQARQHKLYNKELYADFIAAQIKTLSFLAYIIRIYQELVTKYSQQMVKGMLQLLSNCPAETAHLRKELLIAAKHILTTELRNQFIPCMDKLFDESILIGSGYTARETLRPLAYSTLADLVHHVRQHLPLSDLSLAVQLFAKNIDDESLPSSIQTMSCKLLLNLVDCIRSKSEQESGNGRDVLMRMLEVFVLKFHTIARYQLSAIFKKCKPQSELGAVEAALPGVPTAPAAPGPAPSPAPVPAPPPPPPPPPPATPVTPAPVPPFEKQGEKDKEDKQTFQVTDCRSLVKTLVCGVKTITWGITSCKAPGEAQFIPNKQLQPKETQIYIKLVKYAMQALDIYQVQIAGNGQTYIRVANCQTVRMKEEKEVLEHFAGVFTMMNPLTFKEIFQTTVPYMVERISKNYALQIVANSFLANPTTSALFATILVEYLLDRLPEMGSNVELSNLYLKLFKLVFGSVSLFAAENEQMLKPHLHKIVNSSMELAQTAKEPYNYFLLLRALFRSIGGGLNMLQSGLHKQHMKDLFVELCLTVPVRLSSLLPYLPMLMDPLVSALNGSQTLVSQGLRTLELCVDNLQPDFLYDHIQPVRAELMQALWRTLRNPADSISHVAYRVLGKFGGSNRKMLKESQKLHYVVTEVQGPSITVEFSDCKASLQLPMEKAIETALDCLKSANTEPYYRRQAWEVIKCFLVAMMSLEDNKHALYQLLAHPNFTEKTIPNVIISHRYKAQDTPARKTFEQALTGAFMSAVIKDLRPSALPFVASLIRHYTMVAVAQQCGPFLLPCYQVGSQPSTAMFHSEENGSKGMDPLVLIDAIAICMAYEEKELCKIGEVALAVIFDVASIILGSKERACQLPLFSYIVERLCACCYEQAWYAKLGGVVSIKFLMERLPLTWVLQNQQTFLKALLFVMMDLTGEVSNGAVAMAKTTLEQLLMRCATPLKDEERAEEIVAAQEKSFHHVTHDLVREVTSPNSTVRKQAMHSLQVLAQVTGKSVTVIMEPHKEVLQDMVPPKKHLLRHQPANAQIGLMEGNTFCTTLQPRLFTMDLNVVEHKVFYTESREKIIAALFKALNSTNSELQEAGEACMRKFLEGATIEVDQIHTHMRPLLMMLGDYRSLTLNVVNRLTSVTRLFPNSFNDKFCDQMMQHLRKWMEVVVITHKGGQRSDGNEMKICSAIINLFHLIPAAPQTLVKPLLEVVMKTERAMLIEAGSPFREPLIKFLTRHPSQTVELFMMEATLNDPQWSRMFMSFLKHKDARPLRDVLAANPNRFITLLLPGGAQTAVRPGSPSTSTMRLDLQFQAIKIISIIVKNDDSWLASQHSLVSQLRRVWVSENFQERHRKENMAATNWKEPKLLAYCLLNYCKRNYGDIELLFQLLRAFTGRFLCNMTFLKEYMEEEIPKNYSIAQKRALFFRFVDFNDPNFGDELKAKVLQHILNPAFLYSFEKGEGEQLLGPPNPEGDNPESITSVFITKVLDPEKQADMLDSLRIYLLQYATLLVEHAPHHIHDNNKNRNSKLRRLMTFAWPCLLSKACVDPACKYSGHLLLAHIIAKFAIHKKIVLQVFHSLLKAHAMEARAIVRQAMAILTPAVPARMEDGHQMLTHWTRKIIVEEGHTVPQLVHILHLIVQHFKVYYPVRHHLVQHMVSAMQRLGFTPSVTIEQRRLAVDLSEVVIKWELQRIKDQQKSVSKTKRLCVFKPDSDMDPNSSGEGVNSVSSSIKRGLSVDSAQEVKRFRTATGAISAVFGRSQSLPGADSLLAKPIDKQHTDTVVNFLIRVACQ

SEQ ID NO: 10833 - protein, 111 aa, Homo sapiens
VYYPVRHHLVQHMVSAMQRLGFTPSVTIEQRRLAVDLSEVVIKWELQRIKDQQKSVSKTKRLCVFKPDSDMDPNSSGEGVNSVSSSIKRGLSVDSAQEVKRFRTATGAISA

SEQ ID NO: 10834 - protein, 1899 aa, Homo sapiens
  DOMAIN (640)..(1197): FAT domain identified by PFam, accession name FAT, E-value= 3.5e-64, PFam score of 226.6
VNDNTNTAGSPGEVLSRRCVNLLKTALRPDMWPKSELKLQWFDKLLMTVEQPNQVNYGNICTGLEVLSFLLTVLQSPAILSSFKPLQRGIAACMTCGNTKVLRAVHSLLSRLMSIFPTEPSTSSVASKYEELECLYAAVGKVIYEGLTNYEKATNANPSQLFGDQGSWVTLAPGTLMILKSACSNNPSYIDRLISVFMRSLQKMVREHLNPQAASGSTEATSGTSELVMLSLELVKTRLAVMSMEMRKNFIQAILTSLIEKSPDAKILRAVVKIVEEWVKNNSPMAANQTPTLREKSILLVKMMTYIEKRFPEDLELNAQFLDLVNYVYRDETLSGSELTAKLEPAFLSGLRCAQPLIRAKFFEVFDNSMKRRVYERLLYVTCSQNWEAMGNHFWIKQCIEVTSAVQVVLVHLPGVNETRSPRTMSPETAGTEGGLVLFDEKKGLLLAVCEKSTPIGTSCQGAMLPSITNVINLADSHDRAAFAMVTHVKQEPRERENSESKEEDVEIDIELAPGDQTSTPKTKELSEKDIGNQLHMLTNRHDKFLDTLREVKTGALLSAFVQLCHISTTLAEKTWVQLFPRLWKILSDRQQHALAGEISPFLCSGSHQVQRDCQPSALNCFVEAMSQCVPPIPIRPCVLKYLGKTHNLWFRSTLMLEHQAFEKGLSLQIKPKQTTEFYEQESITPPQQEILDSLAELYSLLQEEDMWAGLWQKRCKYSETATAIAYEQHGFFEQAQESYEKAMDKAKKEHERSNASPAIFPEYQLWEDHWIRCSKELNQWEALTEYGQSKGHINPYLVLECAWRVSNWTAMKEALVQVEVSCPKEMAWKVNMYRGYLAICHPEEQQLSFIERLVEMASSLAIREWRRLPHVVSHVHTPLLQSLLCWSHQAAQQIIELQEAAQINAGLQPTNLGRNNSLHDMKTVVKTWRNRLPIVSDDLSHWSSIFMWRQHHYQAIVTAYENSSQHDPSSNNAMLGVHASASAIIQYGKIARKQGLVNVALDILSRIHTIPTVPIVDCFQKIRQQVKCYLQLAGVMGKNECMQVRTGHLKNEARSEEANKAFSAAVQMHDVLVKAWAMWGDYLENIFVKERQLHLGVSAITCYLHACRHQNESKSRKYLAKVLWLLSFDDDKNTLADAVDKYCIGVPPIQWLAWIPQLLTCLVGSEGKLLLNLISQVGRVYPQAVYFPIRTLYLTLKIEQRERYKSALRALASVGFALTLALCVLLSDSGQQQPSSVGNQSHSASDPGPIRATAPMWRCSRIMHMQRELHPTLLSSLEGIVDQMVWFRENWHEEVLRQLQQGLAKCYSVAFEKSGAVSDAKITPHTLNFVKKLVSTFGVGLENVSNVSTMFSSAASESLARRAQATAQDPVFQKLKGQFTTGHTLRTPALGPALVWVQHATAAVSSTRQPASLGQLTNKWGRPQPSSLPQRWDQRALCGPGPCFAAVLVGFVLTSSRPDFDFSVPGSMKLHNLISKLKKWIKILEAKTKQLPKFFLIEEKCRFLSNFSAQTAEVGNSWGSFCMPKPTHYYIKIARFMPRVEIVQKHNTAARRLYIRGHNGKIYPYLVMNDACLTQSSRREERVLQLLRSAGTPVWEKRKETTKRHLFFTVPRVVAVSPQMRLVEDNPSSLSLVEIYKQRCAKKGIEHDNPISRYYDRLATVQARGTQASHQVLRDILKEVQSNMVPRSMLKEWALHTFPNATDYWTFRKMFTIQLALIGFAEFVLHLNRLNPEMLQIAQDTGKLNVAYFRFDINDATGDLDANRPVPFRLTPNISEFLTTIGVSGPLTASMIAVARCFAQPNFKVDGILKTVLRDEIIAWHKKTQEDTSSPLSAAGQPENMDSQQLVSLVQKAVTAIMTRLHNLAQFEGGESKVNTLVAAANSLDNLCRMDPAWHPWL

SEQ ID NO: 10835 - protein, 151 aa, Homo sapiens
  misc_feature (1)...(151): Xaa = X or * as defined in Table 2
NLVACSLPISPETLSPVPLTPKPSGLLALSLGLAFLSCPGLATPSPLPTKPQGTAGPPQPCPCSGLAPQTLYLSRRRLGGWRPSIPAQMTPINRPESQTPVFLEAPHPHWPTGGXVSPYPSGPAQGGAASEVGGCLSIKETPCNVKKKKKK

SEQ ID NO: 10836 - protein, 3878 aa, Homo sapiens
  DOMAIN (525)..(540): WILM'S TUMOUR PROTEIN SIGNATURE domain identified by eMATRIX, accession number PR00049D, p-value=9.000e-14, raw score of 0.00
  DOMAIN (2701)..(3273): FAT domain identified by PFam, accession name FAT, E-value= 3.6e-85, PFam score of 296.4
ARRGERRLVELMDPILFSGEANQPKRKMAFVATQGATEVDQTTLMKKYLQFVAALTDVNTPDETKLKMMHEVSENFENGTSSPQYSTFLEHIIPRVLTFLQDGEVQFLQEKPAQQLRKLVLEIIHRIPTNEHLRPHTKNVLSVMFRFLETENEENVLICLRIIIELHKQFRPPITQEIHHFLDFVKQIYKELPKVVNRYFENPQVIPENTVPPPEMVGMITTIAVKVNPEREDSETRTHSIIPRGSLSLKVLAELPIIVVLMYQLYKLNIHNVVAEFVPLIMNTIAIQVSAQARQHKLYNKELYADFIAAQIKTLSFLAYIIRIYQELVTKYSQQMVKGMLQLLSNCPAETAHLRKELLIAAKHILTTELRNQFIPCMDKLFDESILIGSGYTARETLRPLAYSTLADLVHHVRQHLPLSDLSLAVQLFAKNIDDESLPSSIQTMSCKLLLNLVDCIRSKSEQESGNGRDVLMRMLEVFVLKFHTIARYQLSAIFKKCKPQSELGAVEAALPGVPTAPAAPGPAPSPAPVPAPPPPPPPPPPATPVTPAPVPPFEKQGEKDKEDKQTFQVTDCRSLVKTLVCGVKTITWGITSCKAPGEAQFIPNKQLQPKETQIYIKLVKYAMQALDIYQVQIAGNGQTYIRVANCQTVRMKEEKEVLEHFAGVFTMMNPLTFKEIFQTTVPYMVERISKNYALQIVANSFLANPTTSALFATILVEYLLDRLPEMGSNVELSNLYLKLFKLVFGSVSLFAAENEQMLKPHLHKIVNSSMELAQTAKEPYNYFLLLRALFRSIGGGSHDLLYQEFLPLLPNLLQGLNMLQSGLHKQHMKDLFVELCLTVPVRLSSLLPYLPMLMDPLVSALNGSQTLVSQGLRTLELCVDNLQPDFLYDHIQPVRAELMQALWRTLRNPADSISHVAYRVLGKFGGSNRKMLKESQKLHYVVTEVQGPSITVEFSDCKASLQLPMEKAIETALDCLKSANTEPYYRRQAWEVIKCFLVAMMSLEDNKHALYQLLAHPNFTEKTIPNVIISHRYKAQDTPARKTFEQALTGAFMSAVIKDLRPSALPFVASLIRHYTMVAVAQQCGPFLLPCYQVGSQPSTAMFHSEENGSKGMDPLVLIDAIAICMAYEEKELCKIGEVALAVIFDVASIILGSKERACQLPLFSYIVERLCACCYEQAWYAKLGGVVSIKFLMERLPLTWVLQNQQTFLKALLFVMMDLTGEVSNGAVAMAKTTLEQLLMRCATPLKDEERAEEIVAAQEKSFHHVTHDLVREVTSPNSTVRKQAMHSLQVLAQVTGKSVTVIMEPHKEVLQDMVPPKKHLLRHQPANAQIGLMEGNTFCTTLQPRLFTMDLNVVEHKVFYTELLNLCEAEDSALTKLPCYKSLPSLVPLRIAALNALAACNYLPQSREKIIAALFKALNSTNSELQEAGEACMRKFLEGATIEVDQIHTHMRPLLMMLGDYRSLTLNVVNRLTSVTRLFPNSFNDKFCDQMMQHLRKWMEVVVITHKGGQRSDGNEMKICSAIINLFHLIPAAPQTLVKPLLEVVMKTERAMLIEAGSPFREPLIKFLTRHPSQTVELFMMEATLNDPQWSRMFMSFLKHKDARPLRDVLAANPNRFITLLLPGGAQTAVRPGSPSTSTMRLDLQFQAIKIISIIVKNDDSWLASQHSLVSQLRRVWVSENFQERHRKENMAATNWKEPKLLAYCLLNYCKRNYGDIELLFQLLRAFTGRFLCNMTFLKEYMEEEIPKNYSIAQKRALFFRFVDFNDPNFGDELKAKVLQHILNPAFLYSFEKGEGEQLLGPPNPEGDNPESITSVFITKVLDPEKQADMLDSLRIYLLQYATLLVEHAPHHIHDNNKNRNSKLRRLMTFAWPCLLSKACVDPACKYSGHLLLAHIIAKFAIHKKIVLQVFHSLLKAHAMEARAIVRQAMAILTPAVPARMEDGHQMLTHWTRKIIVEEGHTVPQLVHILHLIVQHFKVYYPVRHHLVQHMVSAMQRLGFTPSVTIEQRRLAVDLSEVVIKWELQRIKDQQPDSDMDPNSSGEGVNSVSSSIKRGLSVDSAQEVKRFRTATGAISAVFGRSQSLPGADSLLAKPIDKQHTDTVVNFLIRVACQVNDNTNTAGSPGEVLSRRCVNLLKTALRPDMWPKSELKLQWFDKLLMTVEQPNQVNYGNICTGLEVLSFLLTVLQSPAILSSFKPLQRGIAACMTCGNTKVLRAVHSLLSRLMSIFPTEPSTSSVASKYEELECLYAAVGKVIYEGLTNYEKATNANPSQLFGTLMILKSACSNNPSYIDRLISVFMRSLQKMVREHLNPQAASGSTEATSGTSELVMLSLELVKTRLAVMSMEMRKNFIQAILTSLIEKSPDAKILRAVVKIVEEWVKNNSPMAANQTPTLREKSILLVKMMTYIEKRFPEDLELNAQFLDLVNYVYRDETLSGSELTAKLEPAFLSGLRCAQPLIRAKFFEVFDNSMKRRVYERLLYVTCSQNWEAMGNHFWIKQCIELLLAVCEKSTPIGTSCQGAMLPSITNVINLADSHDRAAFAMVTHVKQEPRERENSESKEEDVEIDIELAPGDQTSTPKTKELSEKDIGNQLHMLTNRHDKFLDTLREVKTGALLSAFVQLCHISTTLAEKTWVQLFPRLWKILSDRQQHALAGEISPFLCSGSHQVQRDCQPSALNCFVEAMSQCVPPIPIRPCVLKYLGKTHNLWFRSTLMLEHQAFEKGLSLQIKPKQTTEFYEQESITPPQQEILDSLAELYSLLQEEDMWAGLWQKRCKYSETATAIAYEQHGFFEQAQESYEKAMDKAKKEHERSNASPAIFPEYQLWEDHWIRCSKELNQWEALTEYGQSKGHINPYLVLECAWRVSNWTAMKEALVQVEVSCPKEMAWKVNMYRGYLAICHPEEQQLSFIERLVEMASSLAIREWRRLPHVVSHVHTPLLQAAQQIIELQEAAQINAGLQPTNLGRNNSLHDMKTVVKTWRNRLPIVSDDLSHWSSIFMWRQHHYQAIVTAYENSSQHDPSSNNAMLGVHASASAIIQYGKIARKQGLVNVALDILSRIHTIPTVPIVDCFQKIRQQVKCYLQLAGVMGKNECMQGLEVIESTNLKYFTKEMTAEFYALKGMFLAQINKSEEANKAFSAAVQMHDVLVKAWAMWGDYLENIFVKERQLHLGVSAITCYLHACRHQNESKSRKYLAKVLWLLSFDDDKNTLADAVDKYCIGVPPIQWLAWIPQLLTCLVGSEGKLLLNLISQVGRVYPQAVYFPIRTLYLTLKIEQRERYKSDPGPIRATAPMWRCSRIMHMQRELHPTLLSSLEGIVDQMVWFRENWHEEVLRQLQQGLAKCYSVAFEKSGAVSDAKITPHTLNFVKKLVSTFGVGLENVSNVSTMFSSAASESLARRAQATAQDPVFQKLKGQFTTDFDFSVPGSMKLHNLISKLKKWIKILEAKTKQLPLFFLIEEYCRFLSNFSSQTAEVDIPGEFLMPKPTHYYIKIARFMPRVEIVQKHNSAARRLYIRGHNGKIYPYLRSWNDALPSQSSRARRERVVWQLLRLLYPFLEKIKETTKRHLFFTVPRVVAVSPQMRLVEDNPSSLSLVEIYKQRCAKKGIEHDNPISRYYDRLATVQARGTQASHQVLRDILKEVQSNMVPRSMLKEWALHTFPNATDYWTFRKMFTIQLALIGFAEFVLHLNRLNPEMLQIAQDTGKLNVAYFRFDINDATGDLDANRPVPFRLTPNISEFLTTIGVSGPLTASMIAVARCFAQPNFKVDGILKTVLRDEIIAWHKKTQEDTSSPLSAAGQPENMDSQQLVSLVQKAVTAIMTRLHNLAQFEGGESKVNTLVAAANSLDNLCRMDPAWHPWACDCGRHGTRECEGRSGL

SEQ ID NO: 10837 - protein, 3867 aa, Homo sapiens
  DOMAIN (506)..(521): WILM'S TUMOUR PROTEIN SIGNATURE domain identified by eMATRIX, accession number PR00049D, p-value=9.000e-14, raw score of 0.00
  DOMAIN (2700)..(3283): FAT domain identified by PFam, accession name FAT, E-value=1e -82, PFam score of 288.2
EANQPKRKMAFVATQGATVVDQTTLMKKYLQFVAALTDVNTPDETKLKMMQEVSENFENVTSSPQYSTFLEHIIPRFLTFLQDGEVQFLQEKPAQQLRKLVLEIIHRIPTNEHLRPHTKNVLSVMFRFLETENEENVLICLRIIIELHKQFRPPITQEIHHFLDFVKQIYKELPKVVNRYFENPQVIPENTVPPPEMVGMITTIAVKVNPEREDSETRTHSIIPRGSLSLKVLAELPIIVVLMYQLYKLNIHNVVAEFVPLIMNTIAIQVSAQARQHKLYNKELYADFIAAQIKTLSFLAYIIRIYQELVTKYSQQMVKGMLQLLSNCPAETAHLRKELLIAAKHILTTELRNQFIPCMDKLFDESILIGSGYTARETLRPLAYSTLADLVHHVRQHLPLSDLSLAVQLFAKNIDDESLPSSIQTMSCKLLLNLVDCIRSKSEQESGNGRDVLMRMLEVFVLKFHTIARYQLSAIFKKCKPQSELGAVEAALPGVPTAPAAPGPAPSPAPVPAPPPPPPPPPPATPVTPAPVPPFEKQGEKDKEDKQTFQVTDCRSLVKTLVCGVKTITWGITSCKAPGEAQFIPNKQLQPKETQIYIKLVKYAMQALDIYQVQIAGNGQTYIRVANCQTVRMKEEKEVLEHFAGVFTMMNPLTFKEIFQTTVPYMVDRISKNYALQIVANSFLANPTTSALFATILVEYLLDRLPEMGSNVELSNLYLKLFKLVFGSVSLFAAENEQMLKPHLHKIVNSSMELAQTAKEPYNYFLLLRALFRSIGGGSHDLLYQEFLPLLPNLLQGLNMLQSGLHKQHMKDLFVELCLTVPVRLSSLLPYLPMLMDPLVSALNGSQTLVSQGLRTLELCVDNLQPDFLYDHIQPVRAELMQALWRTLRNPADSISHVAYRVLGKFGGSNRKMLKESQKLHYVVTEVQGPSITVEFSDCKASLQLPMEKAIETALDCLKSANTEPYYRRQAWEVIKCFLVAMMSLEDNKHALYQLLAHPNFTEKTIPNVIISHRYKAQDTPARKTFEQALTGAFMSAVIKDLRPSALPFVASLIRHYTMVAVAQQCGPFLLPCYQVGSQPSTAMFHSEENGSKGMDPLVLIDAIAICMAYEEKELCKIGEVALAVIFDVASIILGSKERACQLPLFSYIVERLCACCYEQAWYAKLGGVVSIKFLMERLPLTWVLQNQQTFLKALLFVMMDLTGEVSNGAVAMAKTTLEQLLMRCATPLKDEERAEEIVAAQEKSFHHVTHDLVREVTSPNSTVRKQAMHSLQVLAQVTGKSVTVIMEPHKEVLQDMVPPKKHLLRHQPANAQIGLMEGNTFCTTLQPRLFTMDLNVVEHKVFYTELLNLCEAEDSALTKLPCYKSLPSLVPLRIAALNALAACNYLPQSREKIIAALFKALNSTNSELQEAGEACMRKFLEGATIEVDQIHTHMRPLLMMLGDYRSLTLNVVNRLTSVTRLFPNSFNDKFCDQMMQHLRKWMEVVVITHKGGQRSDGNESISECGRCPLSPFCQFEEMKICSAIINLFHLIPAAPQTLVKPLLEVVMKTERAMLIEAGSPFREPLIKFLTRHPSQTVELFMMEATLNDPQWSRMFMSFLKHKDARPLRDVLAANPNRFITLLLPGGAQTAVRPGSPSTSTMRLDLQFQAIKIISIIVKNDDSWLASQHSLVSQLRRVWVSENFQERHRKENMAATNWKEPKLLAYCLLNYCKRNYGDIELLFQLLRAFTGRFLCNMTFLKEYMEEEIPKNYSIAQKRALFFRFVDFNDPNFGDELKAKVLQHILNPAFLYSFEKGEGEQLLGPPNPEGDNPESITSVFITKVLDPEKQADMLDSLRIYLLQYATLLVEHAPHHIHDNNKNRNSKLRRLMTFAWPCLLSKACVDPACKYSGHLLLAHIIAKFAIHKKIVLQVFHSLLKAHAMEARAIVRQAMAILTPAVPARMEDGHQMLTHWTRKIIVEEGHTVPQLVHILHLIVQHFKVYYPVRHHLVQHMVSAMQRLGFTPSVTIEQRRLAVDLSEVVIKWELQRIKDQQPDSDMDPNSSGEGVNSVSSSIKRGLSVDSAQEVKRFRTATGAISAVFGRSQSLPGADSLLAKPIDKQHTDTVVNFLIRVACQVNDNTNTAGSPGEVLSRRCVNLLKTALRPDMWPKSELKLQWFDKLLMTVEQPNQVNYGNICTGLEVLSFLLTVLQSPAILSSFKPLQRGIAACMTCGNTKVLRAVHSLLSRLMSIFPTEPSTSSVASKYEELECLYAAVGKVIYEGLTNYEKATNANPSQLFGTLMILKSACSNNPSYIDRLISVFMRSLQKMVREHLNPQAASGSTEATSGTSELVMLSLELVKTRLAVMSMEMRKNFIQAILTSLIEKSPDAKILRAVVKIVEEWVKNNSPMAANQTPTLREKSILLVKMMTYIEKRFPEDLELNAQFLDLVNYVYRDETLSGSELTAKLEPAFLSGLRCAQPLIRAKFFEVFDNSMKRRVYERLLYVTCSQNWEAMGNHFWIKQCIELLLAVCEKSTPIGTSCQGAMLPSITNVINLADSHDRAAFAMVTHVKQEPRERENSESKEEDVEIDIELAPGDQTSTPKTKELSEKDIGNQLHMLTNRHDKFLDTLREVKTGALLSAFVQLCHISTTLAEKTWVQLFPRLWKILSDRQQHALAGEISPFLCSGSHQVQRDCQPSALNCFVEAMSQCVPPIPIRPCVLKYLGKTHNLWFRSTLMLEHQAFEKGLSLQIKPKQTTEFYEQESITPPQQEILDSLAELYSLLQEEDMWAGLWQKRCKYSETATAIAYEQHGFFEQAQESYEKAMDKAKKEHERSNASPAIFPEYQLWEDHWIRCSKELNQWEALTEYGQSKGHINPYLVLECAWRVSNWTAMKEALVQVEVSCPKEMAWKVNMYRGYLAICHPEEQQLSFIERLVEMASSLAIREWRRLPHVVSHVHTPLLQAAQQIIELQEAAQINAGLQPTNLGRNNSLHDMKTVVKTWRNRLPIVSDDLSHWSSIFMWRQHHYQGKPTWSGMHSSSIVTAYENSSQHDPSSNNAMLGVHASASAIIQYGKIARKQGLVNVALDILSRIHTIPTVPIVDCFQKIRQQVKCYLQLAGVMGKNECMQGLEVIESTNLKYFTKEMTAEFYALKGMFLAQINKSEEANKAFSAAVQMHDVLVKAWAMWGDYLENIFVKERQLHLGVSAITCYLHACRHQNESKSRKYLAKVLWLLSFDDDKNTLADAVDKYCIGVPPIQWLAWIPQLLTCLVGSEGKLLLNLISQVGRVYPQAVYFPIRTLYLTLKIEQRERYKSDPGPIRATAPMWRCSRIMHMQRELHPTLLSSLEGIVDQMVWFRENWHEEVLRQLQQGLAKCYSVAFEKSGAVSDAKITPHTLNFVKKLVSTFGVGLENVSNVSTMFSSAASESLARRAQATAQDPVFQKLKGQFTTDFDFSVPGSMKLHNLISKLKKWIKILEAKTKQLPKFFLIEEKCRFLSNFSAQTAEVEIPGEFLMPKPTHYYIKIARFMPRVEIVQKHNTAARRLYIRGHNGKIYPYLVMNDACLTESRREERVLQLLRLLNPCLEKRKETTKRHLFFTVPRVVAVSPQMRLVEDNPSSLSLVEIYKQRCAKKGIEHDNPISRYYDRLATVQARGTQASHQVLRDILKEVQSNMVPRSMLKEWALHTFPNATDYWTFRKMFTIQLALIGFAEFVLHLNRLNPEMLQIAQDTGKLNVAYFRFDINDATGDLDANRPVPFRLTPNISEFLTTIGVSGPLTASMIAVARCFAQPNFKVDGILKTVLRDEIIAWHKKTQEDTSSPLSAAGQPENMDSQQLVSLVQKAVTAIMTRLHNLAQFEGGESKVNTLVAAANSLDNLCRMDPAWHPWL

SEQ ID NO: 10838 - protein, 191 aa, Homo sapiens
  DOMAIN (66)..(112): Ribosomal protein S13/S18 domain identified by PFam, accession name Ribosomal_S13, E-value=0.001, PFam score of 19.5
RRFERRPMRPHEVYTPPLVLQPLSLVSPWKSSQHIFRVLNTNIDGRRKNSPLPITAHLRVWARRYAHVVLRKADIDLTKRAGELTEDEVERVITISMQNPRQYKDPKTGFFEQDKKDVKDWKITARVLAQWVWTTSSRERPGSRLEERFRAHKKGLRHFLGGLSCSEGQAHPRPTWPAVGRHRGASAGARR

SEQ ID NO: 10839 - protein, 97 aa, Homo sapiens
  DOMAIN (62)..(76): C2H2-TYPE ZINC FINGER SIGNATURE domain identified by eMATRIX, accession number PR00048A, p-value=6.760e-09, raw score of 10.52
  DOMAIN (33)..(86): Zinc finger, C2H2 type domain identified by PFam, accession name zf-C2H2, E-value=5.5e-05, PFam score of 30.0
GIRPRKREQAASEDADKGPKEPLEYGKAKLSFQSCECGKAFQRHDHLARHRSHLHLKDKARPFQCRYCVKSFTQNYDLLRHERLHMKRRSKQALNSY

SEQ ID NO: 10840 - protein, 67 aa, Homo sapiens
  DOMAIN (17)..(54): S-100/ICaBP type calcium binding protein domain identified by eMATRIX, accession number BL00303A, p-value=2.714e-30, raw score of 21.77
  DOMAIN (18)..(61): S-100/ICaBP type calcium binding domain identified by PFam, accession name S_100, E-value=1.8e-19, PFam score of 78.1
TANVRCLQAQPSAMACPLDQAIGLLVAIFHKYSGREGDKHTLSKKELKELIQKELTIGSKLQDAEIA

SEQ ID NO: 10841 - protein, 115 aa, Homo sapiens
  DOMAIN (53)..(90): S-100/ICaBP type calcium binding protein domain identified by eMATRIX, accession number BL00303A, p-value=7.907e-18, raw score of 21.77
  DOMAIN (60)..(97): S-100/ICaBP type calcium binding domain identified by PFam, accession name S_100, E-value=1.4e-12, PFam score of 55.2
  misc_feature (1)...(115): Xaa = X or * as defined in Table 2
MASCPHAGGPAIPCPVQPLDPDWGHLWRSPAGGIVRSSSAVPAPSPALSHGMPPGSGHWLLVAIFHKYSGREGDKHTLSKKELKELIQKELTIGSKLQDAEIARXMEDLDRNKDQ

SEQ ID NO: 10842 - protein, 122 aa, Homo sapiens
  DOMAIN (75)..(112): S-100/ICaBP type calcium binding protein domain identified by eMATRIX, accession number BL00303B, p-value=4.900e-11, raw score of 26.15
EVLVTMALTRPSAASSKPQPSSPWQCPLDSSHWPPSVAHLPTSYSGREGDKHTLSKRELKELIQKGAPPLASKLQDAEIARLMEDLDRNKDQEVNFPRKYVTFPGGAFAFESTIEGLKRVEK

SEQ ID NO: 10843 - protein, 217 aa, Homo sapiens
  DOMAIN (98)..(149): SAR1 family proteins domain identified by eMATRIX, accession number BL01020C, p-value=1.191e-14, raw score of 15.35
  DOMAIN (24)..(214): ADP-ribosylation factor family domain identified by PFam, accession name arf, E-value=5.3e-70, PFam score of 246.0
KEKARGRPKPLLLLPITSATTAMGLTISSLFSRLFGKKQMRILMVGLDAAGKATILYKLKLGEIVTTIPTIGFGVKTIGYRNICFHSMGMLGGPDRIRPLWKHYFQNTQGLIFVVDSNDRERIQEVADELHKMLLVDELRDPVLLLFANKQDLPNAMAISEMTDKLWLQSLRNRTWYVQATCATQGTGLYEGLDWLSNELSKQLNEIGYLTQGPWFG

SEQ ID NO: 10844 - protein, 458 aa, Homo sapiens
  DOMAIN (34)..(458): Aminotransferases class-I domain identified by PFam, accession name aminotran_1, E-value=0.023, PFam score of -143.1
GVSRQDLTRLFGFSSPQPLKKKLDAWLSEDMNYARFITAASARRNPSPIRTMTDILSRGPKSMISLAGGLPNPNMFPFKTAVITVENGKTIQFGEEMMKRALQYSPSAGIPELLSWLKQLQIKLHNPPTIHYPPSQGQMDLCVTSGSQQGLCKVFEMIINPGDNVLLDEPAYSGTLQSLHPLGCNIINVASDESGIVPDSLRDILSRWKPEDAKNPQKNTPKFLYYCFQMGNNPTGNSLTSERKKEIYELARKYDFLIIEDDPYYFLQFNKFRVPTFLSMDVDGRVIRADSFSKIISSGLRIGFLTGPKPLIERVILHIQVSTLHPSTFNQLMISQLLHEWGEEGFMAHVDRVIDFYSNQKDAILAAADKWLTGLAEWHVPAAGMFLWIKVKGINDVKELIERKRPLKMGVLMLPGNAFLRRIAQLPSPYLRASFSSASPEQMDVAFQVLAQLIKESL

SEQ ID NO: 10845 - protein, 209 aa, Homo sapiens
  misc_feature (1)...(209): Xaa = X or * as defined in Table 2
PICLFSRPTLRPSRSKVSLIEGRGANMAARWRFWCVSVTMVVALLIVCDVPSASAQRKKEMVLSEKVSQLMEWTNKRPVIRMNGDKFRRLVKAPPRNYSVIVMFTALQLHRQCVVCKQADEEFQILANSWRYSSAFTNKDIFFAMVDFDEGSDMYFQMLKHXISAPNFPSTFLQKGKPKRGDTYELQVRGFFQLRQISPWIADRTDVQY

SEQ ID NO: 10846 - protein, 150 aa, Homo sapiens
RSFFFFFCEVGSWVGSMRVVMARLLSEGEQCIPTACAAFAQQPGGRPRRGLAGVGEGGPQCSWVNYRCTLEFLVSLLGTDLARGRGNSATGPTAPADSKQLSCKTFIAVLSLSKEAGFCNVVQGWVSTSWGSSSPSVPQFFPKLLEFTGQ

SEQ ID NO: 10847 - protein, 86 aa, Homo sapiens
DGVSLCYPGWNTVAQSQLTVGSISWAQVILQTQPPRVAVAPGRTTVYRDRVSLCCPGWSGLIVLGLKPPRVLGITGMGSPQPRPGI

SEQ ID NO: 10848 - protein, 75 aa, Homo sapiens
YPCPPERCAQRHGQACLLPSLERKCVISLPPPSPHQTFAGPKGLGHGDALSLGIWPQTPSCEPTQTPKQSNQLVN

SEQ ID NO: 10849 - protein, 147 aa, Homo sapiens
  DOMAIN (95)..(111): 43 KD POSTSYNAPTIC PROTEIN SIGNATURE domain identified by eMATRIX, accession number PR00217C, p-value=7.480e-13, raw score of 10.91
GRVGGKPTTSSSEACRFCGSRSGTELSAVGSVCSDADCQEYAKIACSKTHPCGHPCGGVKNEEHCLPCLHGCDKSATSLKQDADDMCMICFTEALSALDCSHIFHLQCCRRVLENRWLGPRITFGFISCPICKNKINHIVLKDLLDP

SEQ ID NO: 10850 - protein, 112 aa, Homo sapiens
SPRGHYQLLLSGRALADRYRRIYTAALNDRDQGGGSAGHPASRSENLENTVIIPDIKLHSNPSAFNIYCNVRHCVLEWQKKEISLAAASKNSVQSGESDSDEEEESKEPPIN

SEQ ID NO: 10851 - protein, 58 aa, Homo sapiens
NPSAFNIYCNVRHCVLEWQKKEISLAAASKNSVQSGESDSDEEEESKEPPIKLPKVSH

SEQ ID NO: 10852 - protein, 2190 aa, Homo sapiens
  DOMAIN (759)..(808): F-box domain identified by PFam, accession name F-box, E- value=0.093, PFam score of 19.3
VCAHIVQAIRMEATRVREEWEHAISSKENANSQPNDEDASSDAYCFELLSMVLALSGSNVGRQYLAQQLTLLQDLFSLLHTASPRVQRQVTSLLRRVLPEVTPSRLASIIGVKSLPPADISDIIHSTEKGDWNKLGILDMFLGCIAKALTVQLKAKGTTITGTAGTTVGKGVTTVTLPMIFNSSYLRRGESHWWMKGSTPTQISEIIIKLIKDMAAGHLSEAWSRVTKNAIAETIIALTKMEEEFRSPLWLALASLCVLDQDHVDRLSSGRWMGKDGQQKQMPMCDNHDDGETAAIILCNVCGNLCTDCDRFLHLHRRTKTHQRQVFKEEEEAIKVDLHEGCGRTKLFWLMALADSKTMKAMVEFREHTGKPTTSSSEACRFCGSRSGTELSAVGSVCSDADCQEYAKIACSKTHPCGHPCGGVKNEEHCLPCLHGCDKSATSLKQDADDMCMICFTEALSAAPAIQNKINHIVLKDLLDPIKELYEDVRRKALMRLEYEGLHKSEAITTPGVRFYNDPAGYAMNRYAYYVCYKCRKAYFGGEARCDAEAGRGDDYDPRELICGACSDVSRAQVWEYLHYQLSIPNLKSKMLQAALTEQWRLEAFKFAKPEKNLKRHQTKGPERRELQEKEPEPQRWSRVGALRGTSASDAGGARGAAAAGARSGGPGAPHVRAAGPAAAAVPGARGGVWGKPPPAAAKIESGVVVHADTLEAEVEGLLDLRRSRLQMKRGGRDSDRNSSEEGTAEKSKKLRTTNEHSQTCDWGNLLQDIILQVFKYLPLLDRAHASQVCRNWNQVFHMPDLWRCFEFELNQPATSYLKATHPELIKQIIKRHSNHLQYVSFKVDSSKESAEAACDILSQLVNCSLKTLGLISTARPSFMDLPKSHFISALTVVFVNSKSLSSLKIDDTPVDDPSLKVLVANNSDTLKLLKMSSCPHVSPAGILCVADQCHGLRELALNYHLLSDELLLALSSEKHVRLEHLRIDVVSENPGQTHFHTIQKSSWDAFIRHSPKVNLVMYFFLYEEEFDPFFRYEIPATHLYFGRSVSKDVLGRVGMTCPRLVELVVCANGLRPLDEELIRIAERCKNLSAIGLGECEVSCSAFVEFVKMCGGRLSQLSIMEEVLIPDQKYSLEQIHWEVSKHLASTSEKSELSSKHSRSLKPDGRMSRTTADQKKPRGTESLSASESLILKSDAAKLRSDSHSRSLSPNHNTLQTLKSDGRMPSSSRAESPGPGSRLSSPKPKTLPANRSSPSGASSPRSSSPHDKNLPQKSTAPVKTKLDPPRERSKSDSYTLDPDTLRKKKMPLTEPLRGRSTSPKPKSVPKDSTDSPGSENRAPSPHVVQENLHSEVVEVCTSSTLKTNSLTDSTCDDSSGFKGVGWKVSNKVHFIIGKAPLKDEQEMRASPKISRKCANRLTRPTLEQSSFLFKGDGSKPLEPAKQAMSPSVAECARAVFASFLWHEGIVHDAMACSSFLKFHPELSKEHAPIRSSLNSQQPTEEKDTKLKNRHSLEISSALNMFNIAPHGPDISKMGSINKNKVLSMLKEPPLHEKFLKKKECEKENKKSKKEKKKKEKAEVRPRGNLFGEMAQLAVGGPEKDTICELCGESHPYPVTYHMRQAHPGCGRYAGGQGYNSIGHFCGGWAGNCGDGGIGGSTWYLVCDRCREKYLREKQAAAREKAAEGRESAPVAPPGPCSPDLAPQPHIPQHLRSCVQSRSLPPPAAPARPLAADSALAHSPTGALARWRWGPRKRVVMVMAVISKEHVKQSTDTTRRMSSCSNHIEMRQGGWAGNHSGVSGDFLDVLAERAGVKRGQCSSGGQPSVIIIFHPPSVVGTLGSAAAASKFLGLSSTKCREALAIAVSHAGAPMANAATQTKPLHIGNAAKHGIEAAFLAMLGLQGNKQVLDLEAGFGAFYANYSPKVLPSIASYSWLLDQQDVAFKRFPAHLSTHWVADAAASVRKHLVAERALLPTDYIKRIVLRIPNVQYVNRPFPVSEHEARHSFQYVACAMLLDGGITVPSFHECQINRPQDGATFTDRSDTFYGHWRKPLSQEDLEEKFRANASKMLSWDTVESLIKIVKNLEDLEDCSVLTTLLKGPSPPEGLAVAQGQRDILEDHQLQMDESLFWGMPNSHGKSLTTLRPTSYAEAQDCHREWSHGCMASLQLFSHPSPGTRHESEDTVVDIQPSQAFR

SEQ ID NO: 10853 - protein, 4697 aa, Homo sapiens
  DOMAIN (915)..(949): Regulator of chromosome condensation (RCC1) proteins domain identified by eMATRIX, accession number BL00625B, p-value=5.131e- 16, raw score of 17.69
AAPVAAPGALFMPVPDGSVAAAGLGLGLPAADSPGHYQLLLSGRALADRYRRIYTAALNDRDQGGGSAGHPASRNKKILNKKKLKRKQKSKSKVKTRSKSENLENTVIIPDIKLHSNPSAFNIYCNVRHCVLEWQKKEISLAAASKNSVQSGESDSDEEEESKEPPIKLPKIIEVGLCEVFELIKETRFSHPSLCLRSLQALLNVLQGQQPEVLQSEPPEVLESLFQLLLEITVRSTGMNDSTGQSLTALSCACLFSLVASWGETGRTLQAISAILTNNGSHACQTIQVPTILNSLQRSVQAVLVGKIQIQDWFSNGIKKAALMHKWPLKEISVDEDDQCLLQNDGFFLYLLCKDGLYKIGSGYSGTVRGHIYNSTSRIRNRKEKKSWLGYAQGYLLYRDVNNHSMTAIRISPETLEQDGTVMLPDCHTEGQNILFTDGEYINQIAASRDDGFVVRIFATSTEPVLQQELQLKLARKCLHACRISLFDLEKDLHIISTGFDEESAILGAGREFALMKTANGKIYYTGKYQSLGIKQGGPSAGKWVELPITKSPKIVHFSVGHDGSHALLVAEDGSIFFTGSASKGEDGESIKSRRQSKPYKPKKIIKMEGKIVVYTACNNGSSSVISKDGELYMFGKDAIYSDSSSVVTDLKGHFVTQVAMGKAHACVLMKNGEVWTFGVNNKGQCERDTGAMNQGGKGFGVESMASAMDEALEEELDEKDEKYMMCPPGMHKWKLEQCMVCTVCGDCTGYGASCVSSGRPDRVPGGICGCGSGESGCAVCGCCKACARELDGQEARQRGILDAVKEMIPLDLLLAVPVPGVNIEEHLQLRQEEKRQRVIRRHRLEEGRGPLVFAGPIFMNHREQALARLRSHPAHVKHKRDKHKDGSGERGEKDASKITTYPPGSVRFDCELRAVQVSCGFHHSVVLMENGDVYTFGYGQHGQLGHGDVNSRGCPTLVQALPGPSTQVTAGSNHTAVLLMDGQVFTFGSFSKGQLGRPILDVPYWNAKPAPMPNIGSKYGRKATWIGASGDQTFLRIDEALINSHVLATSEIFASKHIIGLVPASISEPPPFKCLLINKVDGSCKTFNDSEQEDLQGFGVCLDPVYDVIWRFRPNTRELWCYNAVVADARLPSAADMQSRCSILSPELALPTGSRALTTRSHAALHILGCLDTLAAMQDLKMGVASTEEETQAVMKVYSKEDYSVVNRFESHGGGWGYSAHSVEAIRFSADTDILLGGLGLFGGRGEYTAKIKLFELGPDGGDHETDGDLLAETDVLAYDCAAREKYAMMFDEPVLLQAGWWYVAWARVSGPSSDCGSHGQASITTDDGVVFQFKSSKKSNNGTDVNAGQIPQLLYRLPTSDGSASKGKQQTSEPVHILKRSFARTVSVECFESLLSILHWSWTTLVLGVEELRGLKGFQFTATLLDLERLRFVGTCCLRLLRVYTCEIYPVSATGKAVVEETSKLAECIGKTRTLLRKILSEPLDHCMVKLDNDPQGYLSQPLSLLEAVLQECHNTFTACFHSFYPTPALQWACLCDLLNCLDQDIQEANFKTSSSRLLAAVMSALCHTSVKLTSIFPIAYDGEVLLRSIVKQVSTENDSTLVHRFPLLVAHMEKLSQSEENISGMTSFREVLEKMLVIVVLPVRNSLRRENELFSSHLVSNTCGLLASIVSELTASALGSEVDGLNSLHSVKASANRFTKTSQGRSWNTGNGSPDAICFSVDKPGIVVVGFSVYGGGGIHEYELEVLVDDSEHAGDSTHSHRWTSLELVKGTYTTDDSPSDIAEIRLDKVVPLKENVKYAVRLRNYGSRTANGDGGMTTVQCPDGVTFTFSTCSLSSNGTNQTRGQIPQILYYRSEFDGDLQSQLLSKANEEDKNCSRALSVVSTVVRASKDLLHRALAVDADDIPELLSSSSLFSMLLPLIIAYIGPVAAAIPKVAVEVFGLVQQLLPSVAILNQKYAPPAFNPNQSTDSTTGNQPEQGLSACTTSSHYAVIESEHPYKPACVMHYKVTFPECVRWMTIEFDPQCGTAQSEDVLRLLIPVRTVQNSGYGPKLTSVHENLNSWIELKKFSGSSGWPTMVLVLPGNEALFSLETASDYVKDDKASFYGFMCFAIGYEFSPGPDEGVIQLEKELANLGGVCAAALMKKDLALPIGNELEEDLEILEEAALQVCKTHSGILGKGLALSHSPTILEALEGNLPLQIQSNEQSFLDDFIACVPGSSGGRLARWLQPDSYADPQKTSLILNKDDIRCGWPTTITVQTKDQYGDVVHVPNMKVEVKAVPVSQKKMSLQQDQAKKPQRIPGSPAVTAASSNTDMTYGGLASPKLDVSYEPMIVKEARYIAITMMKVYENYSFEELRFASPTPKRPSENMLIRVNNDGTYCANWTPGAIGLYTLHVTIDGIEIDAGLEVKVKDPPKGMIPPGTQLVKPKSEPQPNKVRKFVAKDSAGLRIRSHPSLQSEQIGTSEKSMETITFIDEIHNDDGCVWLRLNDETIKKYVPNMNGYTEAWCLSFNQHLGKSLLVPVDESKTNTDDFFKDINSCCPQEATMQEQDMPFLRGGPGMYKVVKTGPSGHNIRSCPNLRGIPIGMLVLGNKVKAVGEVTNSEGTWVQLDQNSMVEFCESDEGEAWSLARDRGGNQYLRHEDEQALLDQNSQTPPPSPFSVQAFNKGASCSAQGFDYGLGNSKGDRGNISTSSKPASTSGKSELSSKHSRSLKPDGRMSRTTADQKKPRGTESLSASESLILKSDAAKLRSDSHSRSLSPNHNTLQTLKSDGRMPSSSRAESPGPGSRLSSPKPKTLPANRSSPSGASSPRSSSPHDKNLPQKSTAPVKTKLDPPRERSKSDSYTLDPDTLRKKKMPLTEPLRGRSTSPKPKSVPKDSTDSPGSENRAPSPHVVQENLHSEVVEVCTSSTLKTNSLTDSTCDDSSEFKSVDEGSNKVHFSIGKAPLKDEQEMRASPKISRKCANRHTRPKKEKSSFLFKGDGSKPLEPAKQAMSPSVAECARAVFASFLWHEGIVHDAMACSSFLKFHPELSKEHAPIRSSLNSQQPTEEKETKLKNRHSLEISYSVQMIFLMNVFNIAHPHGPRYILRWGSINKNKVLSYALRNPPLHEKCEDGKTETTFEMSMHNTMKSKSPLPLTLQHLVAFWEDISLATIKAASQNMIFPSPGSCAVLKKKECEKGRNKKSKKEKKKKEKAEVRPRGNLFGEMAQLAVGGPEKDTICELCGESHPYPVTYHMRQAHPGCGRYAGGQGYNSIGHFCGGWAGNCGDGGIGGSTWYLVCDRCREKYLREKQAAAREKVKQSRRKPMQVKTPRALPTMEAHQVIKAQCQSFLLSLSSAAEPSILCYHPAKPFQSQLPSVKEGISEDLPVKMPCLYLQTLARHHHENFVGYQDDNLFQDEMRYLRSTSVPAPYISVTPDASPNVFEEPESNMKSMPPSLETSPITDTDLAKRTVFQRSYSVVASEYDKQHSILPARVKAIPRRRVNSGDTEVGSSLLRHPSPELSRLISAHSSLSKGERNFQWPVLAFVIQHHDLEGLEIAMKQALRKSACRVFAMEAFNWLLCNVIQTTSLHDILWHFVASLTPAPVEPEEEEDEENKTSKENSEQEKDTRVCEHPLSDIVIAGERAHPLPHTFHRLLQTISDLMMSLPSGSSLQQMALRCWSLKFKQSDHQFLHQSNVFHHINNILSKSDDGDSEESFSISIQSGFEAMSQELCIVMCLKDLTSIVDIKTSSRPAMIGSLTDGSTETFWESGDEDKNKTKNITINCVKGISLPRYVSCFTVDISRDLGNKVTSMTFLTGKAVQDLCPRIKQVDLDSRHIGWVTSELPGGDNHIIKIELKGPENTLRVRQVKVLGWKDGESTKIAGQISASVAPARGNCEAGDSCRVFRLITSQVFGKLISGDAEPTPEQEEKALLSSPEGEEKVYNATSDADLKEHMVGIIFSRSKLTNLQKQVCAHIVQAIRMEATRVREEWEHAISSKENANSQPNDEDASSDAYCFELLSMVLALSGSNVGRQYLAQQLTLLQDLFSLLHTASPRVQRQVTSLLRRVLPEVTPSRLASIIGVKSLPPADISDIIHSTEKGDWNKLGILDMFLGCIAKALTVQLKAKGTTITGTAGTTVGKGVTTVTLPMIFNSSYLRRGESHWWMKGSTPTQISEIIIKLIKDMAAGHLSEAWSRVTKNAIAETIIALTKMEEEFRSPVRCIATTRLWLALASLCVLDQDHVDRLSSGRWMGKDGQQKQMPMCDNHDDGETAAIILCNVCGNLCTDCDRFLHLHRRTKTHQRQVFKEEEEAIKVDLHEGCGRTKLFWLMGTGQILKTMEGQWVGFPRNTQGKPTTSSSKACRFCGSRSGTELSAVGSVCSDAHCQEYAKIACSKTHPCGHPCGGVKNEKHCLPCLHGCDKSATSLKQDAHDMCMICFTEALSAAPAIQLDCSHIFHLQCCRRVLENRWLGPRITFGFISCPICKNKINHIVLKDLLDPIKELYEDVRRKALMRLEYEGLHKSEAITTPGVVRFYNDPAGYAMNRYAYYVCYKCRKAYFGGEARCDAEAGRGDDYDPRELICGACSDVSRAQMCPKHGTDFLEYKCRYCCSVAVFFCFGTTHFCNACHDDFQRMTSIPKEELPHCPAGPKAKQLEGTECPLHVVHPPTGKEFALGCGVCRNAHTFKTTQILCLQREKLPSSPTEDGGEV

SEQ ID NO: 10854 - protein, 96 aa, Homo sapiens
  misc_feature (1)...(96): Xaa = X or * as defined in Table 2
CRKNSCYQAQNFNLRIPFSTTKLINLFHFXNDSQKSTXSDSHLARSSQFCSLNXNYXIXTAKSHDVVCTRQHFPSLSESYIWHVKEKKYNPTAAAI

SEQ ID NO: 10855 - protein, 207 aa, Homo sapiens
LSVASLSFLPNASAEDTMSRLSRSLLWAATCLGVLCVLSADKNTTQHPNVTTLAPISNVTSAPVTSLPLVTTPAPETCEGRNSCVSCFNVSVVNTTCFWIDCKDESYCSHNSTVSDCQVGNTTDFCSVSTATPVPTANSTAKTHSSSPPLLQLPRQLLHQGTTNNTVNSTSQPVRKSTFDAASFIGGIVLVLEIRCHTRNYIPDLKK

SEQ ID NO: 10856 - protein, 68 aa, Homo sapiens
  misc_feature (1)...(68): Xaa = X or * as defined in Table 2
GKSISRYPLYPFVIFYFYFLETESCSSAQAGVQWRNLGSLQSPPSGSSNSPASASXVAETTGERHHAQ

SEQ ID NO: 10857 - protein, 60 aa, Homo sapiens
KKGLSPEQDIKFSGHVSWVGKTSMEVKMQMFQPAFVNPLIPESPEEEELFRQGECTLICL

SEQ ID NO: 10858 - protein, 449 aa, Homo sapiens
LNQGPQNPKKQGNFHIHETSSSIHANHVRDKLREIVKASTNWRDHVKAMEERKLLHSFLAKSQDGLPPRRMKDSYIEVLLPLGSEPELREKYLTVQNTVRFGRILEDLDSLGRFLFCYMHNKIHSAKMSPLSIVTALVDKIDMCKKSLSPEQDIKFSGHVSWVGKTSMEVKMQMFQLHGDEFCPVLDATFVMVARDSENKGPAFVNPLIPESPEEEELFRQGELNKGRRIAFSSTSLLKMAPSAEERTTIHEMFLSTLDPKTISFRSRVLPSNGSVGWENSKLKEFWEICAHPSGSRNIFNRILVGFLMRKAYELAWATACSFGGSRPFVGAVDDIMFQNPVEVGSLLFLSSQVCFTQNNYIQVRVHSEVALPLQEKPAIQPHPMSFHFHRFHVGKKESAPLVFPPKTYGESPCCTLDGQRAFPTPMSGPATLEKGPTLVEPLRTPTIC

SEQ ID NO: 10859 - protein, 95 aa, Homo sapiens
TALQRHSEPSKLTFVGELAHGRFSAKMGTLALGVYHGLPASHMELAQELMETCYQMNRQMETGLSPEIVHFNLYPQPGRRDVEVKPADRHNLLRP

SEQ ID NO: 10860 - protein, 95 aa, Homo sapiens
RHEDLPEISSRMTQRHIQRGPPHLQIRPPSQDTNHDSRLLKPEQVSVGRPEGGFEVVPGTGVTEWTAQGAALPGLVKPQVSPIQGSGGAAVTPEA

SEQ ID NO: 10861 - protein, 112 aa, Homo sapiens
  misc_feature (1)...(112): Xaa = X or * as defined in Table 2
RPLLAFRLEEEQKMRPEIAGLKPANPPVLPAPQKADTDPENLPGMGXPSGQPRVQLCPGSXSLRCPQSKGLEGLPXLQRPEAPGLALVFTSWTQGSSWPPRRGLGGLDGKSV

SEQ ID NO: 10862 - protein, 329 aa, Homo sapiens
  DOMAIN (193)..(218): GLYCOSYL HYDROLASE FAMILY 47 SIGNATURE domain identified by eMATRIX, accession number PR00747G, p-value=6.400e-23, raw score of 14.50
LEFRELSRLTGDKKFQEAVEKVTQHIHGLSGKKDGLVPMFINTHSGLFTHLGVFTLGARADSYYEYLLKQWIQGGKQETQLLEDYVEAIEGVRTHLLRHSEPSKLTFVGELAHGRFSAKMDHLVCFLPGTLALGVYHGLPASHMELAQELMETCYQMNRQMETGLSPEIVHFNLYPQPGRRDVEVKPADRHNLLRPETVESLFYLYRVTGDRKYQDWGWEILQSFSRFTRVSTCPRPAWSRPPGHRHGWAVGLRLAPLLVVAVTWVREGRACRSLGVATLQLGGPGIPIPTELHGCGTQSTWRGWAPLIFISQGLSREGLCCGPSIPPV

SEQ ID NO: 10863 - protein, 762 aa, Homo sapiens
  DOMAIN (603)..(628): GLYCOSYL HYDROLASE FAMILY 47 SIGNATURE domain identified by eMATRIX, accession number PR00747G, p-value=6.400e-23, raw score of 14.50
FRVDGAAMAACEGRRSGALGSSQSDFLTPPVGGAPWAVATTVVMYPPPPPPPHRDFISVTLSFGESYDNSKSWRRRSCWKKWKQLSRLQRNMILFLLAFLLFCGLLFYINLADHWKALAFRLEEEQKMRPEFAGLKPANPPVLPAPQKADTDPENLPEISSQKTQRHIQRGPPHLQIRPPSQDLKDGTQEEATKRQEAPVDPRPEGDPQRTVISWRGAVIEPEQGTELPSRRAEVPTKPPLPPARTQGTPVHLNYRQKGVIDVLLHAWKGYRKFAWGHDDLKPVSRSFSEWFGLGLTLIDALDTMWILGLRKEFEEARKWVSKKLHFEKDVDVNLFESTIRILGGLLSAYHLSGDSLFLRKAEDFGNRLMPAFRTPSKIPYSDVNIGTGVAHPPRWTSDSTVAEVTSIQLEFRELSRLTGDKKFQEAVEKVTQHIHGLSGKKDGLVPLFHQLPTVGLFTHLGVFTLGARADSYYEYLLKQWIQGGKQETQLLEDYVEAIEGVRTHLLRHSEPSKLTFVGELAHGRFSAKMDHLVCFLPGTLALGVYHGLPASHMELAQELMETCYQMNRQMETGLSPEIVHFNLYPQPGRRDVEVKPADRHNLLRPETVESLFYLYRVTGDRKYQDWGWEILQSFSRFTRVPSGGYSSINNVQDPQKPEPRDKMESFFLGETLKYLFLLFSDDPNLLSLDAYVFNTEAHPLPIWTPGLGWMAAGVGTSGGQRHLAGSVAFSKGPRRHRQPPSGPGSELGLGFLLVSALIRTP

SEQ ID NO: 10864 - protein, 153 aa, Homo sapiens
  misc_feature (1)...(153): Xaa = X or * as defined in Table 2
NGVLLSSRLKCSGAISAHCSLCLLGSSNSPTSASQVAGITGAHHHTWANFCIYFFXVEMGFHHVGQAGLELLTSDDPSALASQSAGITGGEHLRLAVTYLNKHERGSFLSSSCLPSAWWKWLCLCSCFWVPKCLALCHFKHYGRRKQVGHTSK

SEQ ID NO: 10865 - protein, 144 aa, Homo sapiens
  misc_feature (1)...(144): Xaa = X or * as defined in Table 2
MHPSCCPCICKPFSTLVKSHVTASASSVPDSTCLRRGQQSCEVVLWQDRVSFQARELKAVINSAVQTSSCFIRHLPRSVSSAIAEGVTSVAIISSSSPSAGGALLWSAPFFETQQTAVAPPASLETLGFHLQPHLLHTAGSFGX

SEQ ID NO: 10866 - protein, 64 aa, Homo sapiens
LGSLLSLSFLFCTPVELGPLVFCSGEDEAADENPESQEMLEEQLVRMLTREVMDLITVCCVSKK

SEQ ID NO: 10867 - protein, 77 aa, Homo sapiens
  misc_feature (1)...(77): Xaa = X or * as defined in Table 2
GGKLINIKYLFYTSYXFLSFPWHFLLAASRAQQGEVMRLACRLDPKTSFQMAGEWLKYQLSTFLDAGSVNWKFFSLL

SEQ ID NO: 10868 - protein, 254 aa, Homo sapiens
LPKDPLNILEEENHIKDALSRIVVEMIKREWPQHWPDMLIELDTLSKQGKTDTSQESKAQANCRVGVAALNTLAGYIDWVSMSHITAENCKLLEILCLLLNEQELQLGAAECLLIAVSRKTCQEAEGAVRPSLTKGAWNGGGDGTSEPGAEGWAYRSPLHSPNLRAAALSPDSGCVWQALCSLLTCSWMLQNQKMKLSFVLGSWSIQMERGNALVVLRSLLWPGLTFYHAPRTKNYGYVYVGTGEKNMDLPFML

SEQ ID NO: 10869 - protein, 71 aa, Homo sapiens
PCFLALAVCCVSKKGADHSSAPPADGDDEEMMATEVTPSAMAELTDLGKCLMKHEDVCTALLITAFHSLAW

SEQ ID NO: 10870 - protein, 312 aa, Homo sapiens
  misc_feature (1)...(312): Xaa = X or * as defined in Table 2
MAEPFTKALDMLDAEKSAILGLPQPLLELNDSPVFKTVLERMQRFFSTLYENCECPWVGLFIXCTEHYEALVSPILGPLFTYLHCGEDEAADENPESQEMLEEQLVRMLTREVMDLITVCCVSKKGADHSSAPPADGDDEEMMATEVTPSAMAELTDLGKCLMKHEVLSGTLLADAVTWLFTSVLKGLQMHGQHDGCMASLVHLAFQIYEALRPRYLEIRAVMEQIPEIQKDSLDQFDCKLLNPSLQKVADKRRKDQFKRLIAGCIGKPLGEQFRKEVHIKNLPSLFKKTKPMLETEVLDNDGGGLATIFEP

SEQ ID NO: 10871 - protein, 1152 aa, Homo sapiens
VAIVRHFGLQILEHVVKFRWNGMSRLEKVYLKNSVMELIANGTLNILEEENHIKDALSRIVVEMIKREWPQHWPDMLIELDTLSKQGETQTELVMFILLRLAEDVVTFQTLPPQRRRDIQQTLTQNMERIFSFLLNTLQENVNKYQQVKTDTSQESKAQANCRVGVAALNTLAGYIDWVSMSHITAENCKLLEILCLLLNEQELQLGAAECLLIAVSRKGKLEDRKPLMVLFGDVAMHYILSAAQTADGGGLVEKHYVFLKRLCQVLCALGNQLCALLGADSDVETPSNFGKYLESFLAFTTHPSQFLRSSTQMTWGALFRHEILSRDPLLLAIIPKYLRASMTNLVKMGFPSKTDSPSCEYSRFDFDSDEDFNAFFNSSRAQQGEVMRLACRLDPKTSFQMAGEWLKYQLSTFLDAGSVNSCSAVGTGEGSLCSVFSPSFVQWEAMTLFLESVITQMFRTLNREEIPVNDGIELLQMVLNFDTKDPLILSCVLTNVSALFPFVTYRPEFLPQVFSKLFSSVTFETVEESKAPRTRAVRNVRRHACSSIIKMCRDYPQLVLPNFDMLYNHVKQLLSNELLLTQMEKCALMEALVLISTQFKNYERQKVFLEELMAPVASIWLSQDMHRVLSDVNAFVAYVGTDQKSCDPGLEDQCGLNRARMSFCVYSILGVVKRTCWPTDLQEAKAGGFAVGYTSSGNPIFRNPCTEQILKLLDNLLALIRTHNTLYAPEMLAKMAEPFTKALDMLDAEKSAILGLPQPLLELNDSPVFKTVLERNAAFLSSYPLMENCFHILGEGQGPSMQQDFYTVEDLATQLLSSAFVNLNNIPDYRLRPMLRVFVKPLVLFCPPEHYEALVSPILGPLFTYLHMRLSQKWQVINQRSLLCGEDEAADENPESQEMLEEQLVRMLTREVMDLITVCCVSKKGADHSSAPPADGDDEEMMATEVTPSAMAELTDLGKCLMKHEDVCTALLITAFNSLAWKDTLSCQRTTSQKFCLPLLQTKCLSGTLLADAVTWLFTSVLKGLQMHGAARTGCMASPGPIWPFQIYEALRPRYLEIRAVMEQIPEIQKDSLDQFDCKLLNPSLQKVADKRRKDQFKRLIAGCIGKPLGEQFRKEVHIKNLPSLFKKTKPMLETEVLDNDGGGLATIFEP

SEQ ID NO: 10872 - protein, 79 aa, Homo sapiens
  DOMAIN (2)..(47): kw TRANSCRIPTASE REVERSE II ORF2 domain identified by eMATRIX, accession number DM01354N, p-value=2.758e-09, raw score of 13.17
  misc_feature (1)...(79): Xaa = X or * as defined in Table 2
NYYTHLYANIFDTLEERGKFLDKQNLSKLEQTGKAQGFYDLLKKLNXXLXSLLTKKASGRGPLLGNSFQFXRKKMTPTL

SEQ ID NO: 10873 - protein, 55 aa, Homo sapiens
PLKRSDGCNDGRPTRPPTRPDTTVFTSNLKQTRMVHLTPVERVCRYCPVGQGKPG

SEQ ID NO: 10874 - protein, 78 aa, Homo sapiens
METSSLRITPDLLNARATERESPKVGPIIGVLPRPPGTLASICGGLVMLLPEITGIALPETVDDVEKLGRHCPKFNAP

SEQ ID NO: 10875 - protein, 565 aa, Homo sapiens
  DOMAIN (189)..(226): 3 kw RESISTANCE BENOMYL YLL028W CYCLOHEXIMIDE domain identified by eMATRIX, accession number DM00973A, p-value=1.391e- 11, raw score of 21.17
LRAAGGGRTMPSFDEALQRVGEFGRFQRRVFLLLCLTGVTFAFLFVGVVFLGTQPDHYWCRGPSAAALAERCGWSPEEEWNRTAPASRGPEPPERRGRCQRYLLEAANDSASATSALSCADPLAAFPNRSAPLVPCRGGWRYAQAHSTIVSEFDLVCVNAWMLDLTQAILNLGFLTGAFTLGYAADRYGRIVIYLLSCLGVGVTGVVVAFAPNFPVFVIFRFLQGVFFSLTWMTCYVIVTEIVGSKQRRIVGIVIQMFFTLGIIILPGIAYFIPNWQGIQLAITLPSFLFLLYYWEVPESPRWLITRKKGDKALQILRRIAKCNGKYLSSNYSEITVTDEEASNPSFLDLVRTPQMRKCTLILMFAWFTSAVVYQGLVMRLGIIGGNLYIDFFISGVVELPGALLILLTIERLGRRLPFAASNIVAGVACLVTAFLPEGIAWLRTTVATLGRLGITMAFEIVYLVNSELYPTTLRNFGVSLCSSLCDFGGIIAPFLLFRLAAVWLELPLIIFGILASICGGLVMLLPETKGIALPETVDDVEKLGSPHSCKCGRNKKTPVSRSHL

SEQ ID NO: 10876 - protein, 89 aa, Homo sapiens
  misc_feature (1)...(89): Xaa = X or * as defined in Table 2
IGVPGAISSSASGRLAVALGTILSFSFSISEFFRFWLRVVGQVDLSGDVVYCTYPLFIFLSALSLEDYSPETKVFKXLKTKHDSHMTGN

SEQ ID NO: 10877 - protein, 513 aa, Homo sapiens
CPLQWICAINNISRQIYLTDNPEAVAIKLNQTALQAGTPITSFGKKQESSCPSQNLKNSEMENENDKIVPKATASLPEAEELIAPGTPIQFDIVLPATEFLDQNRGSRRTNPFGETEDESFPEAEDQQQQEVNEILSGKCCLPDSLLQQMFIVRFLGSMAVKTDSTTEVIYEAMRQVLAARAIHNIFRMTESHLMVTSQSLRAPGGRGGCGRSFSRLKCSCLPALKRAAGLPAQRLSSAKGQTASSSESLTLVVPDGETPPSRNRQTPHTGEFQLASGHQHQRPKVDKSTKMRKKQHRKAENSKNQNASPPPKDHNSLPAREQNWTENEFEEFTERGFRSDRENGTKLENTLQDIIQENFHNLARQANIQIQEIQRTPQRYSSRRATPRHIIIRFTKVEMKEKMLRAAREKGQVVTHKGKSIRLTADLSAETLQVRREWGPIFNNLKEKNFQPRISYPAKLSFISKGEIKFFTDKQMLKDVVTTRPALKELLKEALNMERKNQYQPLQKHTKM

SEQ ID NO: 10878 - protein, 39 aa, Homo sapiens
WDNEWNLVLTDSTPMLSQASLCVYRYNRIAREWTQKYAM

SEQ ID NO: 10879 - protein, 52 aa, Homo sapiens
NLYLKFSNSWLRTQIPKWKFNSVFLFTEYTDDNALIPKNSSVIVRRIPYWRC

SEQ ID NO: 10880 - protein, 154 aa, Homo sapiens
  DOMAIN (49)..(97): Ubiquitin-conjugating enzymes proteins domain identified by eMATRIX, accession number BL00183, p-value=5.846e-19, raw score of 28.97
HPPPTMALKRIHKELNDLARDPPAQCSAGPVGDDMFHWQATIMGPNDGPLYQGGVFFLTIPFPQQITPFKPPKVAFTTRIYHPNINHNGSICLDILRSQWSPALTISKVLLSICSLLCDPNPDDPLVPEIARIYKTDREKYNRIAREWTQKYAM

SEQ ID NO: 10881 - protein, 45 aa, Homo sapiens
LKQLGGLFTFSNVQTYFPLSIFSFTSFCLSIPHPCLFLKPIDGTH

SEQ ID NO: 10882 - protein, 112 aa, Homo sapiens
MGRAWWLMPVIPALWEAEAGGSPESPSFLCAQQPLSRNRQPLSPSSSVFVPPQSPSFLCAQPPTQNIMLVSHIGGIMLLESGELEVANISERRDQPTLTQDLATLLKCPGIQ

SEQ ID NO: 10883 - protein, 343 aa, Homo sapiens
  misc_feature (1)...(343): Xaa = X or * as defined in Table 2
MVRSWLTATSASQVQAILLPQPPKTQLNFTVAIDFTASNGETRMSEKVGGNPLQPTSLHYMSPYQLSAYAMALKAVGEIIQDYDSDKLFPAYGFGAKLPPEGRISHQFPLNNNDEDPNCAGIEGVLESYFQSLRTVQLYGPTYFAPVINQVASNSWSSVTLGTDSEPAVEVPQYVGIRLLVEGFTIKKPMAMCHRRMGVRPAVPLLTQRGSGEGKDSGTPTHSLHTKAQLPSPHVLRHQGQVLRRQHSKLVGTKALSTTGKALRTLPTAKVFISLPXGPWHRRXAGRDSCSAGRXAAEDSLRLFHSSVSHHWKPXSQWLLXSSAVSWEAEAGELLEPGRRRLQ

SEQ ID NO: 10884 - protein, 91 aa, Homo sapiens
  DOMAIN (25)..(53): !!!! PROTEIN ALU SUBFAMILY WARNING ENTRY NUCLEAR PHOSPHO domain identified by eMATRIX, accession number PD02454B, p-value= 8.062e-18, raw score of 11.61
AGRAWWRMPYNPQHFGRPRRVDHLRSGVQDQPGQHGETPSLLKGPKIGWAWWRTPVIPATWEAEPGELLEPRRQRLQVSQDRTTALQPGQE

SEQ ID NO: 10885 - protein, 109 aa, Homo sapiens
  DOMAIN (14)..(42): !!!! PROTEIN ALU SUBFAMILY WARNING ENTRY NUCLEAR PHOSPHO domain identified by eMATRIX, accession number PD02454B, p-value= 4.288e-24, raw score of 11.61
SQHFGRLRWADCLRSGIQDQPGQHGETLSLLKIQKLARSGGTCLQSQLLARLRQENHFSLGGEGCSEPRSGHCTPAWARVGHSVLKTNEQKNSSTLHTKSHWIFQFPGH

SEQ ID NO: 10886 - protein, 100 aa, Homo sapiens
RAEQVCEAKCLRGAPRGENPEEKETARIGPEKQPTSSPLIMANIHQENEEMEQPMQNGEEDRPLGGGEGHQPAGNRRGQARRLAPNFRWAIPNRQIHDGM

SEQ ID NO: 10887 - protein, 130 aa, Homo sapiens
  misc_feature (1)...(130): Xaa = X or * as defined in Table 2
NLREFPWAPCPVLHYKFSSKLNLWIPVTLXGGSHILPSATLKKQIYGEKKLKAADCDLQITNAQTKEEYTDDNALIPKNSSVIVRRIPIGGVKSTSKTYVISRTEPAMATTKAVCKNTISHFFYTLLLPL

SEQ ID NO: 10888 - protein, 204 aa, Homo sapiens
ERTEKSDRAVRSGAPHADGSREAVFCACIWRWRVGGRGRSCCTGRPSWGASSAVTRGPHVTRSCRATQPSLQSSLASGYQLPAALSSARSAFGPGKSGAGSATAKCSSGAPRGENPEEKETARIGPGKTKKMEQPYARMEEEDRHLWGGGEGPPSPARKIERGKARPTCPLNFRMGPYPNRPESMDGDGWKMEMDMGKYSMGGR

SEQ ID NO: 10889 - protein, 294 aa, Homo sapiens
RQRQRPRAGPAGRTGGQKAPGARVPPGPAMEGASFGAGRAGAALDPVSFARRPQTLLRVASWVFSIAVFGPIVNEGYVNTDSGPELRCVFNGNAGACRFGVALGLGAFLACAAFLLLDVRFQQISSVRDRRRAVLLDLGFSGLWSFLWFVGFCFLTNQWQRTAPGPFTTHAGDAARAAIAFNFFSILSWVALTVKALQRFRLGTDMSLFATEQLSTGASQAYPGYPVGSGVEGTETYQSPPFTETLDTSPKGYQVPAYYRLAGTDQGSKATPPTQAPGSPGPPLGPSSSVPRTE

SEQ ID NO: 10890 - protein, 1473 aa, Homo sapiens
  DOMAIN (314)..(330): Protein kinases ATP-binding region proteins domain identified by eMATRIX, accession number BL00107B, p-value=4.273e-13, raw score of 13.31
  misc_feature (1)...(1473): Xaa = X or * as defined in Table 2
MADRTKELESIPDSRNRGSIMGNSRDFADFGTTIKQDFRLLGQTSVDRLLQLSQGQAVKGNQLLPVSLVKRKTTLAPNTQTASPRALADSLMQLARQVSRLESGQDFADFGTTIKQDFRLLGQTSVDRLLQLSQGQAVKGNQLLPVSLVKRKTTLAPNTQTASPRALADSLMQLARQVSRLESGQWTLVPNWNTTQPLSGDILLIYKGFCRFRNHHQTGFSLAGANQRGPLAATLSGPGGEGQSAVARLTGEKKNHPGAQYANRLSPRVGRFINAAGTTGFPTGKRAGYLSEGLVTKWYRSPRLLLSPNNYTKAIDMWAAGCILAEMLTGRMLFAERDRASASSLLTIACLLLTKQPSSVAYQMAPLLLYLVLPCQHLISSPIIPHTEAVGTYVMASLSTIGPTSFWLDFADFGTTIKQDFRLLGQTSVDRLLQLSQGQAVKGNQLLPVSLVKRKTTLAPNTQTASPRALADSLMQLARQVSRLESGQDFADFGTTIKQDFRLLGQTSVDRLLQLSQGQAVKGNQLLPVSLVKRKTTLAPNTQTASPRALADSLMQLARQVSRLESGQNFADFGTTIKQDFRLLGQTSVDRLLQLSQGQAVKGNQLLPVSLVKRKTTLAPNTQTASPRALADSLMQLARQVSRHGKRAGYLSEGLVTKWYRSPRLLLSPNNYTKAIDMWAAGCILAEMLTGRMLFAGAGXSLCILLAHHCLPAINKAALLCGLPDGPSSSLSCPPVRSTSSHLPSSPTLRLLAPTSWPPSPQLVPHHSGWILPISEPPSQQDFRLLGQTSVDRLLQLSQGQAVKGNQLLPVSLVKRKTTLAPNTQTASPRALADSLMQLARQVSRLESGQDFADFGTTIKQDFRLLGQTSVDRLLQLSQGQAVKGNQLLPVSLVKRKTTLAPNTQTASPRALADSLMQLARQVSRLESGQDFADFGTTIKQDFRLLGQTSVDRLLQLSQGQAVKGNQLLPVSLVKRKTTLAPNTQTASPRALADSLMQLARQVSRLESGQWTLVPNWNTTQPLSGDILLIYKGFCRFRNHHQTGFSLAGANQRGPLAATLSGPGGEGQSAVARLTGEKKNHPGAQYANRLSPRVGRFINAAGTTGFPTGKRAGYLSEGLVTKWYRSPRLLLSPNNYTKAIDMWAAGCILAEMLTGRMLFAERDRASASSLLTIACLLLTKQPSSVAYQMAPLLLYLVLPCQHLISSPIIPHTEAVGTYVMASLSTIGPTSFWLDFADFGTTIKQDFRLLGQTSVDRLLQLSQGQAVKGNQLLPVSLVKRKTTLAPNTQTASPRALADSLMQLARQVSRLESGQDFADFGTTIKQDFRLLGQTSVDRLLQLSQGQAVKGNQLLPVSLVKRKTTLAPNTQTASPRALADSLMQLARQVSRLESGQNFADFGTTIKQDFRLLGQTSVDRLLQLSQGQAVKGNQLLPVSLVKRKTTLAPNTQTASPRALADSLMQLARQVSRLESGQ

SEQ ID NO: 10891 - protein, 191 aa, Homo sapiens
MGVEGRYPVSLSSDLEWRPDRCQDASEVQRDPRAGSAPLAEDVQVDPRKDSHSSSERFLEQSHSSMERAFEADYGRSCDYKVGSPSYLDKLLWRDNKPHHYSEPKLILDLSHWKQAAGAPPTATGLADTGAREDEPASLFLENPQGVKSTQGAQNTPARPPTTPSAAWLPRPPPPGPTLADSCSVTKWGQV

SEQ ID NO: 10892 - protein, 588 aa, Homo sapiens
  DOMAIN (168)..(199): Protein kinases ATP-binding region proteins domain identified by eMATRIX, accession number BL00107A, p-value=1.000e-15, raw score of 18.39
GARGRPLAETWPFLTAPVLPGQLQITEPTMAEKGDCIASVYGYDLGGRFVDFQPLGFGVNGLVLSAVDSRACRKVAVKKIALSDARSMKHALREIKIIRRLDHDNIVKVYEVLGPKGTDLQGELFKFSVAYIVQEYMETDLARLLEQGTLAEEHAKLFMYQLLRGLKYIHSANVLHRDLKPANIFISTEDLVLKIGDFGLAKESLNQHYSHKGYLSEGLVTKWYRSPRLLLSPNNYTKAIDMWAAGCILAEMLTGRMLFAGAHELEQMQLILETIPVIREEDKDELLRVMPSFVSSTWEVKRPLRKLLPEVNSEAIDFLEKILTFNPMDRLTAEMGLQHPYMSPYSCPEDEPTSQHPFRIEDEIDDIVLMAANQSQLSNWDTCSSRYPVSLSSDLEWRPDRCQDASEVQRDPRAGSAPLAENVQKDPRKDSHSSSERFLEQSHSSMERAFEADYGRSCDYKVGSPSYLDKLLWRDNKPHHYSEPKLILDLSHWKQAAGAPPTATGLADTGAREDEPASLFLEIAQWVKSTQGAQSTPTRPPTTPSAACLPRPPPPGPGGRRRQPPVRPGRVHLPRPEALHQARGPAGQ

SEQ ID NO: 10893 - protein, 55 aa, Homo sapiens
ILTQCGGFQPTLDKFSSRASEIALAKAKQVINTPRTSSSFNATTVLSAFLLGEKS

SEQ ID NO: 10894 - protein, 558 aa, Homo sapiens
  DOMAIN (90)..(108): Pyridine nucleotide-disulphide oxidoreductases class-II activ domain identified by eMATRIX, accession number BL00573A, p-value= 4.986e-09, raw score of 9.65
NTIHDTIELYLSRCWVCCAVSAIARARAALPNIIVGEKGGAGSARSSPRRAAAECAQIPQPRRSPAVQAEPARRSRFPPFTLQGAFSSAIIGAGIGGTSAAYYLRQKFGKDVKIDLFEREEVGGRLATMMVQGQEYEAGGSVIHPLNLHMKRFVKDLGLSAVQASGGLLGIYNGETLVFEESNWFIINVIKLVWRYGFQSLRMHMWVEDVVDKFMRIYRYQSHDYAFSSVEKLLHALGGDDFLGMLNRTLLETLQKPGCSEKLLNEMIGPVMRVNYGQSTDINAFVGAGSLSCSDSGLWAVEGGNKLVCSGLLQASKSNLISGSVMYIEEKTKTKYTGNPTKMYEVVYQIGTETRSDFYDIVLVATPLNRKMSNITFLNFDPPIEEFHQYYQHIVTTLVKGELNTSIFSSRPIDKFGLNTVLTTDNSDLFINSIGIVPSVREKEDPEPSTDGTYVWKIFSQETLTKAQILKLFLSYDYAVKKPWLAYPHYKPPPEKCPLLSFSHDRLYYLNGIECAASAMEMSAIAAHNAALLAYHRWNGHTDMIDQDGLYEKLKTEL

SEQ ID NO: 10895 - protein, 101 aa, Homo sapiens
  misc_feature (1)...(101): Xaa = X or * as defined in Table 2
GCTKDSNIYFIKEHFQSVNNHIKRCLISFLIRVMXLKPQQVTIITPIRMAKIXKAENSKCWQECGAAVTLMHXXXVXLPLKSWHFLLKLSTCLFYDLAIPL

SEQ ID NO: 10896 - protein, 70 aa, Homo sapiens
QSFAPGPPPFIPPPWGGRAGGFPGPGMGPPPGPPGGTSSSSKIPKFGRPRGGPPFPPLPKRVRPGDFFYP

SEQ ID NO: 10897 - protein, 299 aa, Homo sapiens
  DOMAIN (149)..(169): PHTHALATE DIOXYGENASE REDUCTASE FAMILY SIGNATURE domain identified by eMATRIX, accession number PR00409F, p-value=8.597e- 12, raw score of 12.70
SHGENCKCPSTGDYRKLIYHLKGCQGLRNKGSSPFTSIVSAAKVCGAASESPSVKSLCLLVADQDFSFKAGQWVDFFIPGVSVVGGFSICSSPRLLEQERVIELAVKYTNHPPALWVHNTCTLDCEVAVRVGGEFFFDPQPADASRNLVLIAGGVGINPLLSILRHAADLLREQANKRNGYEIGTIKTILQCKKYPAELLFKKNILDLVNEFPEKIACSLHVTKTDYTNPMRNSKPYITEGRITEKEIRDHISKETLFYICGPPPMTDFFSKQLENNHVPKEHICFEEVVVGGRQRQKK

SEQ ID NO: 10898 - protein, 142 aa, Homo sapiens
  DOMAIN (49)..(97): Small cytokines (intercrine/chemokine) C-x-C subfamily signat domain identified by eMATRIX, accession number BL00471, p-value= 3.382e-12, raw score of 23.92
WKRSLKYLWLLRSHNSHPSSSLTPSLSPSAEAEEDGDLQCLCVKTTSQVRPRHITSLEVIKAGPHCPTAQLIVSPRTASVSAPAPCLLCPSLPLLMPFANPRTESHVSSLFPARATLKNGRKICLDLQALLYKKIIKEHLES

SEQ ID NO: 10899 - protein, 133 aa, Homo sapiens
  DOMAIN (64)..(73): SMALL CXC CYTOKINE FAMILY SIGNATURE domain identified by eMATRIX, accession number PR00437A, p-value=3.893e-09, raw score of 9.50
  misc_feature (1)...(133): Xaa = X or * as defined in Table 2
HEETQPEFPIALSTEILLEALPQHELRSRVLRAQRPGLLFLGLLLLPLVVAFRRAEAEEDGDLQCLCVKTTSQVRPRHIHQPGRXSKAGPHCPTCPTXXPRXKNGRKIWLGTWQAPLLQGKXFKETFWESLAN

SEQ ID NO: 10900 - protein, 48 aa, Homo sapiens
QTTANLLLKIQCHIIAPPEALTFPLPTWPLEYTQNRKKKGKVGGKGTA

SEQ ID NO: 10901 - protein, 340 aa, Homo sapiens
  DOMAIN (67)..(107): ADP-ribosylation factors family proteins domain identified by eMATRIX, accession number BL01019A, p-value=1.000e-40, raw score of 13.20
SEFPARTPRRCPRPSPGPAMGLTVSALFSRIFGKKQMPILMVGLDAAGKTSHILYKLKLGEIVTTIPTIGFNVETVEYKNICFTVWDVGGQDKIRPLWRHYFQNTQGLIFVVDSNDRERVQESADELQKMLQEDELRDAVLLVFSNKQDMPNAMPVSELTDKLGLQHLRSRTWYVQAHLLPTQGTGFVTMVLDWLSHELFKALNQPWGRPLDARKSRCVQSPTMSQNSPTPRGKCPFPPTFSLPHSPQASASAPCSCLHVLSVVGAVEPLLSGHRGVPLFLPAGTYGRGFAGPRPPSSRGGAGIWVSFFFFCFGCTLGGQVGRGKVRAFGWCYNVALDLE

SEQ ID NO: 10902 - protein, 100 aa, Homo sapiens
GLPQQTLKRIQQVLIKCCLAFYLFLFFFFLRWSLALLPILECSGVISAHCNLRLPGLGDSLASASRVAGMTTGTCHHAQLIFCIFSRDGVSVLARTVWIS

SEQ ID NO: 10903 - protein, 242 aa, Homo sapiens
  DOMAIN (85)..(96): GLUCAGON POLYPEPTIDE HORMONE SUPERFAMILY SIGNATURE domain identified by eMATRIX, accession number PR00275A, p-value=1.750e- 13, raw score of 10.76
GRVGQSTSKVPKEGLLSLHLLCSTAHYQKTAEMKSIYFVAGLFVMLVQGSWQRSLQDTEEKSRSFSASQADPLSDPDQMNEDKRHSQGTFTSDYSKYLDSRRAQDFLQWLMNTKRNRNNIAKRHDEFERHAEGTFTSDVSSYLEGQAAKEFIAWLVKGRGRRDFPGEGRPLLKNLAGRHADGSFSDEMNTILDNLPARDFINWLIRTKITDREITYITYSEIIFTNITLLAHVGCLEMFKSW

SEQ ID NO: 10904 - protein, 23 aa, Homo sapiens
MEAPQVPPCPAGPLIYTKVPCFL

SEQ ID NO: 10905 - protein, 116 aa, Homo sapiens
GVLSPPVKSMDLNKPIDKRISKGAQPTCHDFNQFTAATETISLLVGFSAGQVQYLDPIKKDTSKLFNEEVIAAPRAPNFSAFSPTHYMPLGCSCLRNSVGLRGAGPGRDGEWGDSS

SEQ ID NO: 10906 - protein, 66 aa, Homo sapiens
  misc_feature (1)...(66): Xaa = X or * as defined in Table 2
HASDKMADKEKKKKESILDLSKYIDKTIRVKFQGGREGEGLPLSVPPLXKFQINPATEMMRTHAEA

SEQ ID NO: 10907 - protein, 160 aa, Homo sapiens
MGQARWLTPVIPALWEAEAGGSRGPSAAGLLEFARGPLQTLFAWVSAAVAAEQRIFVNRECCCLIVPLEVLSQRSTRPCEVSVCPYWENAFQLGCSGTVTVGSTTVTLAECLKWLTTFQLVSIGLAAVAMDVLNTGDVVWLLNVAAEWNSFVNIPNDSLS

SEQ ID NO: 10908 - protein, 130 aa, Homo sapiens
  misc_feature (1)...(130): Xaa = X or * as defined in Table 2
QRPIXPTKPIGQRVSKGHQPTRHDFTQFLAAHETISRLVGFSAGQVQYLDLIKKDPSKLFNEERLIDKTKVTYLKWLPESESLFLASHASGHLYLYNVSHPCASAPPQYSLLKQGEGFSVYAAKYNDLFL

SEQ ID NO: 10909 - protein, 688 aa, Homo sapiens
  DOMAIN (54)..(81): C1q domain proteins domain identified by eMATRIX, accession number BL01113A, p-value=9.308e-09, raw score of 17.99
MAAGGAEGGSGPGAAMGDCAEIKSQFRTREGFYKLLPGDGAARRSGPASAQTPVPPQPPQPPPGPASASGPGAAGPASSPPPAGPGPGPALPAVRLSLVRLGEPDSAGAGEPPATPAGLGSGGDRVCFNLGRELYFYPGCCRRGSQRWHTPLTPFLPPLKSIDLNKPIDKRIYKGTQPTCHDFNQFTAATETISLLVGFSAGQVQYLDLIKKDTSKLFNEERLIDKTKVTYLKWLPESESLFLASHASGHLYLYNVSHPCASAPPQYSLLKQAWGFSFYAAKSKAPRNPLAKWAVGEGPLNEFAFSPDGRHLACVSQDGCLRVFHFDSMLLRGLMKSYFGGLLCVCWSPDGRYVVTGGEDDLVTVWSFTEGRVVARGHGHKSWVNAVAFDSLYTTRAEEAATAAGADGERSGEEEEEEPEAAGTGSAGGAPLSPLPKAGSITYRFGSAGQDTQFCLWDLTEDVLYPHPPLARTRTLPGTPGTTPPAASSSRGGEPGPGPLPRSLSRSNSLPHPAGGGKAGGPGVAAEPGTPFSIGRFATLTLQERRDRGAEKEHKRYHSLGNISRGGSGGSGSGGEKPSGPVPRSRLDPAKVLGTALCPRIHEVPLLEPLVCKKIAQERLTVLLFLEDCIITACQEGLICTWPRPGKAFTDEETEAQTGEGSWPRSPSKSVVEGISSQPGNSPSGTVV

SEQ ID NO: 10910 - protein, 385 aa, Homo sapiens
  DOMAIN (270)..(313): 'Homeobox' domain proteins domain identified by eMATRIX, accession number BL00027, p-value=5.500e-27, raw score of 26.43
MGGTTLAWSMARDSAGLVAGNLDLSEKHDPRPPPLLHPPGPTAVLAGDGSFRNPALGKPLTKSQATWMTTLSYDAARRAGGGGDGPGGPEPGWVDPRTWLSFQGPPGGPGIGPGVGPGSEVWGIPPCPPPYEFCGGMAYCGPQVGVGLVPQGGLETSQPEGEAGVGVESNSDGASPEPCTVTPGAVKLEKEKLEQNPEEARKVFSQTTICRFEALQLSFKNMCKLRPLLQKWVEEADNNENLQEICKAETLVQARKRKRTSIENRVRGNLENLFLQCPKPTLQQISHIAQQLGLEKDVVRVWFCNRRQKGKRSSSDYAQREDFEAAGSPFSGGPVSFPLAPGPHFGTPGYGSPHFTALYSSVPFPEGEAFPPVSVTTLGSPMHSN

SEQ ID NO: 10911 - protein, 380 aa, Homo sapiens
  DOMAIN (211)..(227): POU DOMAIN SIGNATURE domain identified by eMATRIX, accession number PR00028C, p-value=5.263e-19, raw score of 11.87
LLISPGPRLGAPSFPMAGHLASDFAFSPPPGGGGDGPGGPEPGWVDPRTWLSFQRPPGGPGIGPGVGPGSEVWGIPPCPPPYEFCGGMAYCGPQVGVGLVPQGGLETSQPEGEAGVGVESNSDGASPEPCTVTPGAVKLEKEKLEQNPEKSQDIKALQKELEQFAKLLKQKRITLGYTQADVGLTLGVLFGKVFSQTTICRFEALQLSFKNMCKLRPLLQKWVEEADNNENLQEICKAETLVQARKRKRTSIENRVRGNLENLFLQCPETPHWQQISHIAQQLGLKKHVVRVVRVWFCNRRQKGKRSSSDFAQREDFEAAGSPFSGGPVSLFPLPPGPHFGTPGYGSPHFTALYSSVPFPEGEAFPPVSVTILGSPMHSN

SEQ ID NO: 10912 - protein, 74 aa, Homo sapiens
GQTSQHHVALRTTQHHWALGQHRVALHTVEYYLALKRKEMDTGCKWMELEYIVLSGISQSQEDMHCMIPFVSGP

SEQ ID NO: 10913 - protein, 189 aa, Homo sapiens
  misc_feature (1)...(189): Xaa = X or * as defined in Table 2
CQARPMPLRAFNPVSSFRWARGMTIVAALMTVFFIMQLVGQVPAALWVIFGEDRFRWSATMIGLSLALFGILHALAQAFVTGPATKRFGEKQAIIAGMGPNALGYVLLAFATRGWMAFPIMILLASGGIGMPALQAMWLAEXITDTRANVKRLLLQNVCDLSNNMNGLRFPCFVKSCGTPTSVLTKRWH

SEQ ID NO: 10914 - protein, 638 aa, Homo sapiens
  DOMAIN (522)..(540): BLEOMYCIN RESISTANCE PROTEIN SIGNATURE domain identified by eMATRIX, accession number PR00311A, p-value=6.182e-16, raw score of 15.62
MIGLSLAVFGILHALAQAFVTGPATKRFGEKQAIIAHGGRRAGLRLAGVPTRGWMAFPIMILLASGASGCRVAGHAVQAALRAQGLLKEAEHVESQSAETVLTPDECQLLGYLDKGKRKRKEKAGSLQWAYMAIARLGGFMDSKRTGIASWGALCAGAAVLFVKTDLSGALNELQDEAARLSWLATTGVPCAAVLDVVTEAGRDWLLLGEVPGQDLLSSHLAPAEKVSIMADAMRRLHTLDPATCPFDHQAKHRIERARTRMEAGLKDLMRRDQDLIKRQDEDRSHDEQDDARRSPAAWWRAYSAIAATTDNSGRPVLFVKTDLSGALNELQDEAARLSWLATTGVPCAAVLDVVTEAGRDWLLLGEVPGQDLLSSHLAPAEKVSIMADAMRRLHTLDPATCPFDHQAKHRIERARTRMEAGLVDQDDLDEEHQGLAPAELFARLKARMPDGEDLVVTHGDAACRISWWKMAAFLDSSTVAGWDIALATRDIAEELGGEWADRFLVLYVLLSGTLGFEMTDQATPNLPSRDFDSTAAFYERLGFGIVFRDAGWMILQRGDLMLEFFAHPGLDPLASWFSCCLRLDDLAEFYRQCKSVGIQETSSGYPRIHAPELQEWGGTMAALVRIFVKEPYFCGVT

SEQ ID NO: 10915 - protein, 283 aa, Homo sapiens
  DOMAIN (262)..(275): REGULATORY PROTEIN ROP SIGNATURE domain identified by eMATRIX, accession number PR00835D, p-value=1.000e-17, raw score of 7.82
ALEVLHVLQQPQDLPVLGGQRGLQPRARAQSEVHLIPVSSFRWARGMTIVAALMTVFFIMQLVGQVPAALWVIFGEDRFRWSATMIGLSLAVFGILHALAQAFVTGPATKRFGEKQAIIAGMAADALGYVLLAFATRGWMAFPIMILLASGGIGMPALQAMQPLAEHIHRVRHLQQPHAAHLGQRWVLATGAHDRAPVVEDPVVSRMNHRYASEREATAAAKRLRPEQQHEWSSVSVFRKVLLEKLNELDADEQADICESLHDHADELYRSCLARFGDDGENL

SEQ ID NO: 10916 - protein, 278 aa, Homo sapiens
  DOMAIN (137)..(153): Protein kinases ATP-binding region proteins domain identified by eMATRIX, accession number BL00107B, p-value=6.786e-11, raw score of 13.31
MVSISRPRDPPASASQSAGITGPALGAEGERAFHRHRVMIVTEGAPGGLSSGHLRDAMDSEAGTDDGCASHVRVVHRDLKPSNILYVDESGNPECLRICDFGFAKQLRAENGLLMTPCYTANFVAPEVLKRQGYDEGCDIWSLGILLYTMLAGYTPFANGPSDTPEEILTRIGSGKFTLSGGNWNTVSETAKDLVSKMLHVDPHQRLTAKQVLQHPWVTQKDKLPQSQLSHQDLQLVKGAMAATYSALNSSKPTPQLKPIESSILAQRRVRKLPSTTL

SEQ ID NO: 10917 - protein, 976 aa, Homo sapiens
  DOMAIN (839)..(894): Beta-lactamase class-A proteins domain identified by eMATRIX, accession number BL00146C, p-value=1.000e-40, raw score of 25.08
MTMWVLHCAFTYFVSAWSKHGYAHAVTAKILYAGRIVAGITGATGAVAGAYIADITDGEDRARHFGLMSACFGVGMVAGPVAGGLLGAISLHAPFLAAAVLNGLNLLLGCFLMQESHKGERRPMPLRAFNPVSSFRWARGMTIVAALMTVFFIMQLVGQVPAALWVIFGEDRFRWSATMIGLSLAVFGILHALAQAFVTGPATKRFGEKQAIIAGMAADALGYVLLAFATRGWMAFPIMILLASGGIGMPALQAMLSRQVDDDHQGQLQGSLAALTSLTSIIGPLIVTAIYAASASTWNGLAWIAFAKSFTLPQALRAQGLLKEAEHVESQSAETVLTPDECQLLGYLDKGKRKRKEKAGSPAAWVERLFGYDWAQQTIGCSDAAVFRLSAQGRPVLFVKTDLSGALNELQDEAARLSWLATTGVPCAAVLDVVTEAGRDWLLLGEVPGQDLLSSHLAPAEKVSIMADAMRRLHTLDPATCPFDHQAKHRIERARTRMEAGLVDQDDLDEEHQGLAPAELFARLKARMPDGEDLVVTHGDACLPNIMVENGRFSGFIDCGRLGVADRYQDIALATRDIAEELGGEWADRFLVLYVLLSGTLGFEMTDQATPNLPSRDFDSTAAFYERLGFGIVFRDAGWMILQRGDLMLEFFAHPGLDPLASWFSCCLRLDDLAEFYRQCKSVGIQETSSGYPRIHAPELQEWGGTMAALVRIFVKEPYFCETLVKVKDAEDQLGARVGYIELDLNSGKILESFRPEERFPMMSTFKVLLCGAVLSRVDAGQEQLGRRIHYSQNDLVEYSPVTEKHLTDGMTVRELCSAAITMSDNTAANLLLTTIGGPKELTAFLHNMGDHVTRLDRWEPELNEAIPNDERDTTMPAAMATTLRKLLTGELLTLASRQQLIDWMEADKVAGPLLRSALPAGWFIADKSGAGGRSLWKNASNAAFLRFLAFCWPFAHMFFPALSPDSVDNRITAFE

SEQ ID NO: 10918 - protein, 175 aa, Homo sapiens
GAPWGQVPAALWVIFGEDRFRWSATMIGLSLAVFGILHALAQAFVTGPATKRFGEKQAIIAGMAADALGYVLLAFATRGWMAFPIMILLASGGIGMPALQAMLSRQVDDDHQGQLQGSLAALTSLTSIIGPLIVTAIYAASASTWNGLAWIVGAALYLVCLPALRRGAWSRATST

SEQ ID NO: 10919 - protein, 1175 aa, Homo sapiens
MNMNIKKIVKQATVLTFTTALLAGGATQAFAKENNQKAYKETYGVSHITRHDMLQIPKQQQNEKYQVPQFDQSTIKNIESAKGLDVWDSWPLQNADGTVAEYNGYHVVFALAGSPKDADDTSIYMFYQKVNHTFIDYRTGRLQPAIPQSLPEALRLAADLAEQKQRLEQKMLMDAPKVEFAERVATARKVLIGNYAKVLGLGQNYLFTWLRDNGILIATGERRNVPKQEYISRGYFTLKETVIDTSNGSRISFTTRITGKGQQWLMKRLLDADVVRTTSIVMLAKVTFLSCITMSDFTFSGYELACFVTHSGLSRSAGHILSQCANLAATTSEYFIHKPHRLIAAETGYSQSTVVRAFREAVNKGILSVEIVIGDHRERRANLYRFTPSFLAFAQQAKNALIESKLKISSAATKVKAVLAKTLALFNFLSTPPCQNDTPSPCQDDVAIKNKKSQVKKTKRSVSGGAGTTSLKKLTSWIAKAKAKADNLRLSKKRTQKHEFKQKVEAAARKYAYLKNKRSPDIGGISNFDNLPHCMTVNEALNAVLAKNKDNEQWGAVAGAYIADITDGEDRARHFGLMSACFGVGMVAGPVAGGLLGAISLHAPFLAAAVLNGLNLLLGCFLMQESHKGERRGEEEDMSFFSTLKTALSLKEKLAATGVLVLICALVGAGFAWERHQLKQAIEKIGSLDQAVKERDKSIMDLNQTIETMNKAEQHFHSQEVKNESEQAKYADRQMERKAEVQKQLVAAGNVRQRIPADTQRLLRESISEFNADADKGIFMSDKVTVKQTINKATSIYKIEQITVGKPGSEQYRRAFELADQLGLKHPDCIEHVFPTYADEQCTHVLTEEDFFSTEEREGVDRCIGVICSSVSDELFPNVPEYGGIGYQFLYEGDELKCYEHDIESKAKELTVNSNNTVQPVALMRLGVFVPKPSKSKGESKEIDATKAFSQLEIAKAEGYDDIKITGPRLDMDTDFKTWIGVIYAFSKYGLSSNTIQLSFQEFAKACGFPSKRLDAKLRLTIHESLGRLRNKGIAFKRGKDAKGGYQTGLLKVGRFDADLDLIELEADSKLWELFQLDYRVLLQHHALRALPKKEAAQAIYTFIESLPQNPLPLSFARIRERLALQSAVGEQNRIIKKAIEQLKTIGYLDCSIEKKGRESFVIVHSRNPKLKLPE

SEQ ID NO: 10920 - protein, 534 aa, Homo sapiens
  DOMAIN (157)..(177): RIBOSOMAL PROTEIN L7A FAMILY SIGNATURE domain identified by eMATRIX, accession number PR00882C, p-value=2.969e-23, raw score of 15.18
MLMKAHKGVLGEQEKVPRRLMKVLKGVPGEQEKVLWEAREEGVSSRWTGSPMGCEQRVWMGDEQAMEPLGLADGKLWRTFMGAADAERKEGRGMKVAPAPAVVKKQEAKKVVNPLFEKRPKNFGVGQDIQPKRDLTRFVKWPRYIKLQHQRAFLYKRLKVPPAINQFTQALDRQTATQLLELAHKYRPETKQEKKQRLLAQAEEKTAGKGDISTKRLPVLQAGVNWEDKSALAKLVEGIRTNYNERYNEIHHHWGGNVLGPESVARIAKLKKADGSLRLDFTVCKKAWIVSHPVSQRKLPQQKRQNRKKRQEVQAWGSGPCLSLVVGSEPATGGSSCSETSGFGKSCKVKETNPQPMAATPTLEQGEAVAAHAEIPPACSHGQVPAALWVIFGEDRFRWSATMIGLSLAVFGILHALAQAFVTGPATKRFGEKQAIIAGMAADALGYVLLAFATRGWMAFPIMILLASGGIGMPALQAMLSRQLTSIIGPLIVTAIYAASASTWNGLAWIVGAALYLVCLPALRRGAWSRATST

SEQ ID NO: 10921 - protein, 67 aa, Homo sapiens
  DOMAIN (14)..(47): ESICULAR LUMEN DOMAIN domain identified by eMATRIX, accession number DM01292C, p-value=4.672e-09, raw score of 12.45
VPGLLRDIVHSDSIASHYGVLLALYALMQFLCAPVLGALSDRFGRRPVLLASLLGAMSAVLAPGCCF

SEQ ID NO: 10922 - protein, 141 aa, Homo sapiens
MAKMKNQIIPSVGEKLEQQKPSYDARAFVTGPATKRFGEKQAIIAGMATDALGYVLLAFATRGWMAFPIMILLASGGIGMPALQAMLSRQLTSIIGPLIVTAIYAASASTWNGLAWIVGAALYLVCLPALRRGAWSRATST

SEQ ID NO: 10923 - protein, 543 aa, Homo sapiens
  DOMAIN (71)..(108): 3 kw RESISTANCE BENOMYL YLL028W CYCLOHEXIMIDE domain identified by eMATRIX, accession number DM00973A, p-value=1.000e- 09, raw score of 21.17
MKSNNALIVILGTVTLDAVGIGLVMPVLPGLLRDIVHSDSIASHYGVLLALYALMQFLCAPVLGALSDRFGRRPVLLASLLGATIDYAIMATTPVLWILYAGRIVAGITGATGAVAGAYIADITDGEDRARHFGLMSACFGVGMVAGPVAGGLLGAISLHAPFLAAAVLNGLNLLLGCFLMQESHKGERRPMPLRAFNPVSSFRWARGMTIVAALMTVFFIMQLVGQVPAALWVIFGEDRFRWSATMIGLSLAVFGILHALAQAFVTGPATKRFGEKQAIIAGMAADALGYVLLAFATRGWMAFPIMILLASGGIGMPALQAMLSRQVDDDHQGQLQGSLAALTSLTSIIGPLIVTAIYAASASTWNGLAWIVGAALYLVCLPALRRERSVAAGRFLLVRIAATCRANRAMSSSTTPHSRTASSIENFGIQSLFHLLICDLSTPTASAVFSVPSIAILLSNALSIRRASLRLFARTICSYMQIETKEMVIFLRDDGISLQYPDGQCAGYGIDGNMLIFMGQSCELFPTKIILHDQRTTNFTHK

SEQ ID NO: 10924 - protein, 336 aa, Homo sapiens
  misc_feature (1)...(336): Xaa = X or * as defined in Table 2
MMGLRNSYDVKERLKHQVRGGKAPKAVNSGKLLPFPRLKELAGVEGMGNCYLGRTQPGTRMQWSPMKLSVELRAGQRSLLRESKGKEIPEPRCAAVGGKEPEAKPPKVPRPMPLRAFNPVSSFRWARGMTIVAALMTVFFIMQLVGQVPAALWVIFGEDRFRWSATMIGLSLAVFGILHALAQAFVTGPATKRFGEKQAIIAGMAADALGYVLLAFATRGWMAFPIMILLASGGIGMPALQAMLSRQVDDDHQGQLQGSLAALTSLTSIIGPLIVTAIYAASASTWNGLAWIXPGMFIISNPYREHPLSFHRYHYPHEQKSPLHGGISDQTGKNRP

SEQ ID NO: 10925 - protein, 878 aa, Homo sapiens
  DOMAIN (812)..(833): Isocitrate and isopropylmalate dehydrogenases proteins domain identified by eMATRIX, accession number BL00470A, p-value=2.500e- 18, raw score of 16.25
MPLRAFNPVSSFRWARGMTIVAALMTVFFIMQLVGQVPAALWVIFGEDRFRWSATMIGLSLAVFGILHALAQAFVTGPATKRFGEKQAIIAGMAADALGYVLLAFATRGWMAFPIMILLASGGIGMPALQAMLSRQVDDDHQGQLQGSLAALTSLTSIIGPLIVTAIYAASASTWNGMLLATLWNTYICINEALALTLSDFSLVPPHPYRQLFTLTTFHNRACSSSVTRIVSILSRFIGIITPMNRNPPYTEASVTKQEKTALNMARFIRSQTLTLLEKLNELDADEQADICESLHDHADELYRSCLARFGDDGNSYDHDYAKLACLQVEGRGGGTFAHELLAVEYAGWISPAFRLKVNQTFIDYRTGRLQPAIPQSLPEALRLAADLAEQKQRLEQKMLMDAPKVEFAERVATASGVLIGNYAKVLGLGQNYLFTWLRDNGILIATGERRNVPKQEYISRGYFTLKETVIDTSNGSRISFTTRITGKGQQWLMKRLLDARNRDRYKQWKQDFFHDSYNRQSAGHILSQCANLAATTSEYFIHKPHRLIAAETGYSQSTVVRAFREAVNKGILSVEIVIGDHRERRANLYRFTPSFLAFAQQAKNALIESKLKISSAATKDDVAIKNKKSQVKKTKRSVSGGAGTTSLKKLTSWIAKAKAKADNLRLSKKRTQKHEFKQKVEAAARKYAYLKNKRSPDIGGISNFDNLPHCMTILYAGRIVAGITGATGAVAGAYIADITDGEDRARHFGLMSACFGVGMVAGPVAGGLLGAISLHAPFLAAAVLNGLNLLLGCFLMQESHKGERRGELLKIVVLPGDHVGQEITAEAIKVLKAISDVRSNVKFDFENHLIGGAAIDLQGGGGKPRCVSKSLMLHCTR

SEQ ID NO: 10926 - protein, 402 aa, Homo sapiens
  DOMAIN (77)..(114): 3 kw RESISTANCE BENOMYL YLL028W CYCLOHEXIMIDE domain identified by eMATRIX, accession number DM00973A, p-value=1.000e- 09, raw score of 21.17
RSQAPCMKSNNALIVILGTVTLDAVGIGLVMPVLPGLLRDIVHSDSIASHYGVLLALYALMQFLCAPVLGALSDRFGRRPVLLASLLGATIDYAIMATTPVLWILYAGRIVAGITGATGAVAGAYIADITDGEDRARHFGLMSACFGVGMVAGPVAGGLLGAISLHAPFLAAAVLNGLNLLLGCFLMQESHKGERRPMPLRAFNPVSSFRWARGMTIVAALMTVFFIMQLVGQVPAALWVIFGEDRFRWSATMIGLSLAVFGMLHALAQAFVTGPATKRFGEKQAIIAGMAADALGYVLLAFATRGWMAFPIMILLASGGIGMPALQAMLSRQVDDDHQGQLQGSLAALTSLTSITGPLIVTAIYAASASTWNGLAWIVGAALYLVCLPALRRGAWSRATST

SEQ ID NO: 10927 - protein, 221 aa, Homo sapiens
  misc_feature (1)...(221): Xaa = X or * as defined in Table 2
LGSCTVTQTGVQWCGHSSLRPQTQAQAILLPCLSNCWDYKHEPLHLAYVTQFCFLSFFFGGGGWSLALSPMLECGGVILAQCKLRLLGFTPFSCLSLPSSWDHRHPPPCLANFLNFSVETGFHFLAQDGLDLLTSSIPPASAFPKCWDYRRDHRAQPMXCNSDVNSLMLPQMPQVKAHQSPIGCPRFRHTCRLGCPQTTCTSHQLAANLEVPTMPSSSITH

SEQ ID NO: 10928 - protein, 530 aa, Homo sapiens
  DOMAIN (310)..(359): PRECURSOR GLYCOPROTEIN SIGNAL CELL domain identified by eMATRIX, accession number PD02576A, p-value=2.800e-20, raw score of 27.60
MSAAPCSTVPSPIDHPRAEECGHTARDWQVAPPAAQSHDDDEEEEEDEKEEEEEEEELLLAGSPYSPTVPCFPLECPCLENGSRQKQDKHTPGFKHKFQHAFFFSFPLATITHSFWVAEHSLRLEGKQGAQISPHLQVGPGLVWQGYLWQNREAGSSRDSHLNMPCGMAAGHSHSGTLFSDQGLWEQCQLLKSTSVFARCHPLVDPEPFVALCEKTLCECAGGLECACPALLEYARTCAQEGMVLYGWTDHSACSPVCPAGMEYRQCVSPCARTCQSLHINEMCQERCVDGCSCPEGQLLDEGLCVESTECPCVHSGKRYPPGTSLSRDCNTCICRNSQWICSNEECPDREGHNSRQREVALSAQVGCNHVTPALVSGQVPAALWVIFGEDRFRWSATMIGLSLAVFGILHALAQAFVTGPATKRFGEKQAIIAGMAADALGYVLLAFATRGWMAFPIMILLASGGIGMPALQAMLSRQLTSIIGPLIVTAIYAASASTWNGLAWIVGAALYLVCLPALRRGAWSRATST

SEQ ID NO: 10929 - protein, 330 aa, Homo sapiens
  DOMAIN (48)..(59): Acyl-CoA dehydrogenases proteins domain identified by eMATRIX, accession number BL00072A, p-value=2.125e-09, raw score of 12.45
TSPTATGPALVCYRASLVALREEDTRSQEYVPFRGNRDFAHVKKMGGLGLLAMDVPEELGGAGLDYLAYAIAMEEISRGCASTGVIMSVNNSLYLGPILKFGSKEQKQAWVTPFTSGDKIGCFALSGTRAFNPVSSFRWARGMTIVAALMTVFFIMQLVGQVPAALWVIFGEDRFRWSATMIGLSLAVFGILHALAQAFVTGPATKRFGEKQAIIAGMAADALGYVLLAFATRGWMAFPIMILLASGGIGMPALQAMLSRQVDDDHQGQLQGSLAALTSLTSIIGPLIVTAIYAASASTWNGLAWIVGAALYLVCLPALRRGAWSRATST

SEQ ID NO: 10930 - protein, 205 aa, Homo sapiens
MPLRAFNPVSSFRWARGMTIVAALMTVFFIMQLVGQVPAALWVIFGEDRFRWSATMIGLSLAVFGILHALAQAFVTGPATKRFGEKQAIIAGMAADALGYVLLAFATRGWMAFPIMILLASGGIGMPALQAMLSRQVDDDHQGQLQGSLAALTSLTSIIGPLIVTAIYAASASTWNGLAWIVGAALYLVCLPALRRGAWSRATST

SEQ ID NO: 10931 - protein, 187 aa, Homo sapiens
MPLRAFNPVSSFRWARGMTIVAALMTVFFIMQLVGQVPAALWVIFGEDRFRWSATMIGLSLAVFGILHALAQAFVTGPATKRFGEKQAIIAGMAADALGYVLLAFATRGWMAFPIMILLASGGIGMPALQAMLSRQLTSIIGPLIVTAIYAASASTWNGLAWIVGAALYLVCLPALRRGAWSRATST

SEQ ID NO: 10932 - protein, 310 aa, Homo sapiens
MTMWVLHCAFTYFVSAWSKHGYAHAVTAKILYAGRIVAGITGATGAVAGAYIADITDGEDRARHFGLMSACFGVGMVAGPVAGGLLGAISLHAPFLAAAVLNGLNLLLGCFLMQESHKGERRPMPLRAFNPVSSFRWARGMTIVAALMTVFFIMQLVGQVPAALWVIFGEDRFRWSATMIGLSLAVFGILHALAQAFVTGPATKRFGEKQAIIAGMAADALGYVLLAFATRGWMAFPIMILLASGGIGMPALQAMLSRQLTSIIGPLIVTAIYAASASTWNGLAWIVGAALYLVCLPALRRGAWSRATST

SEQ ID NO: 10933 - protein, 2447 aa, Homo sapiens
  DOMAIN (1259)..(1275): Spectrin repeat proteins domain identified by eMATRIX, accession number PF00435B, p-value=2.607e-10, raw score of 13.41
  misc_feature (1)...(2447): Xaa = X or * as defined in Table 2
LRTCWHSDCQNTAADHSAQGSGRRHRKPCNRCAPGSQNWAVPLLPDISCRTGCAVRKDRLIAGPIQXNLKTAVVGRQPYLTKLCLMLGCLGRMRWRCSTGWLRLRTSSVQCSXRISNRMSCTGSMLTTWLXMKLQQVNGLGQGLIQSAGKDCDVQGLEHDMEEINARWNTLNKKVAQRIAQLQEALLHCGKFQDALEPLLSWLADTEELIANQKPPSAEYKVVKAQIQEQKLLQRLLDDRKATVDMLQAEGGRIAQSAELADREKITGQLESLESRWTELLSKAAARQKQLEDILVLAKQFHETAEPISDFLSVTEKKLANSEPVGTQTAKIQQQIIRHKALEEDIENHATDVHQAVKIGQSLSSLTSPAEQGVLSEKIDSLQARYSEIQDRCCRKAALLDQALSNARLFGEDEVEVLNWLAEVEDKLSSVFVKDFKQDVLHRQHADHLALNEEIVNRKKNVDQAIKNGQALLKQTTGEEVLLIQEKLDGIKTRYADITVTSSKALRTLEQARQLATKFQSTYEELTGWLREVEEELATSGGQSPTGEQIPQFQQRQKELKKEVMEHRLVLDTVNEVSRALLELVPWRAREGLDKLVSDANEQYKLVSDTIGQRVDEIDAAIQRSQQYEQAADAELAWVAETKRKLMALGPIRLEQDQTTAQLQVQKAFSIDIIRHKDSMDELFSHRSEIFGTCGEEQKTVLQEKTESLIQQYEAISLLNSERYARLERAQVLVNQFWETYEELSPWIEETRALIAQLPSPAIDHEQLRQQQEEMRQLRESIAEHKPHIDKLLKIGPQLKELNPEEGEMVEEKYQKAENMYAQIKEEVRQRALALDEAVSQSTQFHDKIEPMLETLENLSSRLRMPPLIPAEVDKIRECISDNKSATVELEKLQPSFEALKRRGEELIGRSQGADKDLAAKEIQDKLDQMVFFWEDIKARAEEREIKFLDVLELAEKFWYDMAALLTTIKDTQDIVHDLESPGIDPSIIKQQVEAAETIKEETDGLHEELEFIRILGADLIFACGETEKPEVRKSIDEMNNAWENLNKTWKERLEKLEDAMQAAVQYQDTLQAMFDWLDNTVIKLCTMPPVGTDLNTVKDQLNEMKEFKVEVYQQQIEMEKLNHQGELMLKKATDETDRDIIREPLTELKHLWENLGEKIAHRQHKLEGALLALGQFQHALEELMSWLTHTEELLDAQRPISGDPKVIEVELAKHHVLKNDVLAHQATVETVNKAGNELLESSAGDDASSLRSRLEAMNQCWESVLQKTEEREQQLQSTLQQAQGFHSEIEDFLLELTRMESQLSASKPTGGLPETAREQLDTHMELYSQLKAKEETYNQLLDKGRLMLLSRDDSGSGSKTEQSVALLEQKWHVVSSKMEERKSKLEEALNLATEFQNSLQEFINWLTLAEQSLNIASPPSLILNTVLSQIEEHKVFANEVNAHRDQIIELDQTGNQLKFLSQKQDVVLIKNLLVSVQSRWEKVVQRSIERGRSLDDARKRAKQFHEAWKKLIDWLEDAESHLDSELEISNDPDKIKLQLSKHKEFQKTLGGKQPVYDTTIRTGRALKEKTLLPEDSQKLDNFLGEVRDKWDTVCGKSVERQHKLEEALLFSGQFMDALQALVDWLYKVEPQLAEDQPVHGDLDLVMNLMDAHKVFQKELGKRTGTVQVLKRSGRELIENSRDDTTWVKGQLQELSTRWDTVCKLSVSKQSRLEQALKQAEVFRDTVHMLLEWLSEAEQTLRFRGALPDDTEALQSLIDTHKEFMKKVEEKRVDVNSAVAMGEVILAVCHPDCITTIKHWITIIRARFEEVLTWAKQHQQRLETALSELVANAELLEELLAWIQWAETTLIQRDQEPIPQNIDRVKALIAEHQTFMEEMTRKQPDVDRVTKTYKRKNIEPTHAPFIEKSRSGGRKSLSQPTPPPMPILSQSEAKNPRINQLSARWQQVWLLALERQRKLNDALDPSIVSPKCRRPGGRQAYPLVNSGGSKRQIAKNRGATQAFAKENNQKAYKETYGVSHITRHDMLQIPKQQQNEKYQVPQFDQSTIKNIESAKGLDVWDSWPLQNADGTVAEYNGYHVVFALAGSPKDADDTSIYMFYQKVGDNSIDSWKNAGRVFKDSDKFDANDPILKDQTQEWSGSATFTSDGKIRLFYTDYSGKHYGKQSLTTAQVNVSKSDDTLKINGVEDHKTIFDGDGKTYQNVQQFIDEGNYTSGDNHTLRDPHYVEDKGHKYLVFEANTGTENGYQGEESLFNKAYYGGGTNFFRKESQKLQQSAKKRDAELANGALGIIELNNDYTLKKVMKPLITSNTVTDEIERANVFKMNGKWYLFTDSRGSKMTIDGINSNDIYMLGYVSHSLTGPYKPLNKTGLVLQMGLDPNDVTFTYSHFAVPQAKGNNVVITSYMTNRGFFEDKKATFAPSFLMNIKGNKTSVVKNSILEQGQLTVN

SEQ ID NO: 10934 - protein, 720 aa, Homo sapiens
  DOMAIN (37)..(66): kw REPLICATION REPB REPA INITIATION domain identified by eMATRIX, accession number DM00653A, p-value=5.200e-19, raw score of 20.40
LFPRLLSFLTTPPHCSFSICFVICSRTLILKGSSLITGCTQFRLSETKEITNPYAMRLYESLCQYRKPDGSGIVSLKIDWIIERYQLPQSYQRMPDFLPPLPAGALSLISKVTDRANDSMEQGAETSQGALGTLANVVTSLANLSESLNNGDTSEIQPEDQSASEITRAFDTLAKALNTTDSSSSPSLADGIDTSGGGSIHVISRDQSTPIIEVEGPLLSDTHVTFKSIREDRNGRSQKTVHTEGDMNMNIKKIVKQATVLTFTTALLAGGATQAFAKENNQKAYKETYGVSHITRHDMLQIPKQQQNEKYQVPQFDQSTIKNIESAKGLDVWDSWPLQNADGTVAEYNGYHVVFALAGSPKDADDTSIYMFYQKVGDNSIDSWKNAGRVFKDSDKFDANDPILKDQTQEWSGSATFTSDGKIRLFYTDYSGKHYGKQSLTTAQVNVSKSDDTLKINGVEDHKTIFDGDGKTYQNVQQFIDEGNYTSGDNHTLRDPHYVEDKGHKYLVFEANTGTENGYQGEESLFNKAYYGGGTNFFRKESQKLQQSAKKRDAELANGALGIIELNNDYTLKKVMKPLITSNTVTDEIERANVFKMNGKWYLFTDSRGSKMTIDGINSNDIYMLGYVSNSLTGPYKPLNKTGLVLQMGLDPNDVTFTYSHFAVPQAKGNNVVITSYMTNRGFFEDKKATFAPSFLMNIKGNKTSVVKNSILEQGQLTVN

SEQ ID NO: 10935 - protein, 868 aa, Homo sapiens
  DOMAIN (802)..(823): Isocitrate and isopropylmalate dehydrogenases proteins domain identified by eMATRIX, accession number BL00470A, p-value=2.500e- 18, raw score of 16.25
MPLRAFNPVSSFRWARGMTIVAALMTVFFIMQLVGQVPAALWVIFGEDRFRWSATMIGLSLAVFGILHALAQAFVTGPATKRFGEKQAIIAGMAADALGYVLLAFATRGWMAFPIMILLASGGIGMPALQAMLSRQVDDDHQGQLQGSLAALTSLTSIIGPLIVTAIYAASASTWNGNRACSSSVTRIVSILSRFIGIITPMNRNPPYTEASVTKQEKTALNMARFIRSQTLTLLEKLNELDADEQADICESLHDHADELYRSCLARFGDDGNSYDHDYAKLACLQVEGRGGGTFAHELLAVEYAGWISPAFRLKVNQTFIDYRTGRLQPAIPQSLPEALRLAADLAEQKQRLEQKMLMDAPKVEFAERVATASGVLIGNYAKVLGLGQNYLFTWLRDNGILIATGERRNVPKQEYISRGYFTLKETVIDTSNGSRISFTTRITGKGQQWLMKRLLDARNRDRYKQWKQDFFHDSYNRQSAGHILSQCANLAATTSEYFIHKPHRLIAAETGYSQSTVVRAFREAVNKGILSVEIVIGDHRERRANLYRFTPSFLAFAQQAKNALIESKLKISSAATKVKAVLAKTLALFNFLSTPPCQNDTPSPCQDDVAIKNKKSQVKKTKRSVSGGAGTTSLKKLTSWIAKAKAKADNLRLSKKRTQKHEFKQKVEAAARKYAYLKNKRSPDIGGISNFDNLPHCMTVNEALNAVLAKNKDNEQWGAVAGAYIADITDGEDRARHFGLMSACFGVGMVAGPVAGGLLGAISLHAPFLAAAVLNGLNLLLGCFLMQESHKGERRGELLKIVVLPGDHVGQEITAEAIKVLKAISDVRSNVKFDFENHLIGGAAIDLQGGGGKPRCVSKSLMLHCTR

SEQ ID NO: 10936 - protein, 691 aa, Homo sapiens
MNMNIKKIVKQATVLTFTTALLAGGATQAFAKENNQKAYKETYGVSHITRHDMLQIPKQQQNEKYQVPQFDQSTIKNIESAKGLDVWDSWPLQNADGTVAEYNGYHVVFALAGSPKDADDTSIYMFYQKVGDNSIDSWKNAGRVFKDSDKFDANDPILKDQTQEWSGSATFTSDGKIRLFYTDYSGKHYGKQSLTTAQSIREDRNGRSQKTVHTERDMIMNIKKIVKQATVLTFTTALLAGGATHAFAKENNQKAYKETYGVSHITRHDMLQIPKQQQNEKYQVPQFDQSTIKNIESAKGLDVWDSWPLQNADGTVAEYNGYHVVFALAGSPKDADDTSIYMFYQKVGDNSIDSWKNAGRVFKDSDKFDANDPILKDQTQEWSGSATFTSDGKIRLFYTDYSGKHYGKQSLTTAQVNVSKSDDTLKINGVEDHKTIFDGDGKTYQNVQQFIDEGNYTSGDNHTLRDPHYVEDKGHKYLVFEANTGTENGYQGEESLFNKAYYGGGTNFFRKESQKLQQSAKKRDAELANGALGIIELNNDYTLKKVMKPLITSNTVTDEIERANVFKMNGKWYLFTDSRGSKMTIDGINSNDIYMLGYVSNSLTGPYKPLNKTGLVLQMGLDPNDVTFTYSHFAVPQAKGNNVVITSYMTNRGFFEDKKATFAPSFLMNIKGNKTSVVKNSILEQGQLTVN

SEQ ID NO: 10937 - protein, 1201 aa, Homo sapiens
  DOMAIN (235)..(278): 1 kw MIND INHIBITOR DIVISION CONTROL domain identified by eMATRIX, accession number DM01756B, p-value=4.822e-15, raw score of 22.91
MKLMETLNQCINAGHEMTKAIAIAQFNDDSPEARKITRRWRIGEAADLVGVSSQAIRDAEKAGRLPHPDMEIRGRVEQRVGYTIEQINHMRDVFGTRLRRAEDVFPPVIGVAAHKGGVYKTSVSVHLAQDLALKGLRVLLVEGNDPQGTASMYHGWVPDLHIHAEDTLLPFYLGEKDDVTYAIKPTCWPGLDIIPSCLALHRIETELMGKFDEGKLPTDPHLMLRLAIETVAHDYDVIVIDSAPNLGIGTINVVCAADVLIVPTPAELFDYTSALQFFDMLRDLLKNVDLKGFEPDAEEIAKFLGLDKRNFKATRGSATLHHWQQLAQPHLGGILDPRPGVVTKGFRTLDVDLDEVYCLNDFEEDDTATSTPVQHPETSGERSQARVTVSGSRSYPSRPQASPEEMQEPPAATEEEEEEEEEEGSVLCAERVGQMTKTYNDIDAVTRLLEEVASRFWVLALARAAGEAGVHFLCPVGKALQDIPASLLPGSVWNDSHICLGPGPLPNELICPWSPKLIRGFSYNLGCGPQMGKGQRLPHRLNAGIPSNSHGLENLHEVLVLCVWQAGVAQEETWHSASQLLLFQLKLVLKGAKECACTASEHLYWGPLGSVNGSPQGQQRTPISRNISWQALDTHLEILLLTICAAGTLMSFLFSDLWVLMEAMESRRRPKEGRQVSKVLKPEIWPFQNTTRTPGPVGSPHVTTDCQDDAAPPFLETQQRDSESPKTGIIRGSSCLLQRSNGLIPKALGAGGATQAFAKENNQKAYKETYGVSHITRHDMLQIPKQQQNEKYQVPQFDQSTIKNIESAKGLDVWDSWPLQNADGTVAEYNGYHVVFALAGSPKDADDTSIYMFYQKVGDNSIDSWKNAGRVFKDSDKFDANDPILKDQTQEWSGSATFTSDGKIRLFYTDYSGKHYGKQSLTTAQVNVSKSDDTLKINGVEDHKTIFDGDGKTYQNVQQFIDEGNYTSGDNHTLRDPHYVEDKGHKYLVFEANTGTENGYQGEESLFNKAYYGGGTNFFRKESQKLQQSAKKRDAELANGALGIIELNNDYTLKKVMKPLITSNTVTDEIERANVFKMNGKWYLFTDSRGSKMTIDGINSNDIYMLGYVSNSLTGPYKPLNKTGLVLQMGLDPNDVTFTYSHFAVPQAKGNNVVITSYMTNRGFFEDKKATFAPSFLMNIKGNKTSVVKNSILEQGQLTVN

SEQ ID NO: 10938 - protein, 225 aa, Homo sapiens
  misc_feature (1)...(225): Xaa = X or * as defined in Table 2
AAAAASKVLMXTGGAAPQEQPXTGGVQAXAPGSVAAEGASVEGPGFGDTAPAHQGLSPTRSHGQGGAGRASAHSRDPPGGTGGWGFLKCGPGALCPERGKDGASASVPRGPYAEAEKGGWALRGLGGVAAPGPPSRAGQAPSGLHTGPNARPAPWPIPGQGGGLRRDQAGXVSSWTGSTEPGAHTAHRAPGHGGKGGSPQQPHPQGPGQIPTTHTRMHSCRITAA

SEQ ID NO: 10939 - protein, 232 aa, Homo sapiens
  DOMAIN (137)..(164): Protamine P1 proteins domain identified by eMATRIX, accession number BL00048, p-value=8.224e-10, raw score of 6.39
DRRCPIFCLLPFGIRFILLFGSSLQRGPFIILFFFFLIFFFPFIFLLSILGSFFFFLLSPVLLLLHHFFLSLFPACLLLHLLLLLLQVLGAQLGRCLHASSPTWCRGRGRVLAGSRGPGAETEGPWTAEGGRGRNLARWRRRRRQRQRRPLGKLGLWKRRQRRAGWGGGGSGAETRRAAAVRRAGGRAVQAVAGALGRGSSIPGSPPPHQQSAADQPCRPREGNPLIRRRLP

SEQ ID NO: 10940 - protein, 309 aa, Homo sapiens
  DOMAIN (105)..(132): Mrp family proteins domain identified by eMATRIX, accession number BL01215A, p-value=4.964e-11, raw score of 9.75
  misc_feature (1)...(309): Xaa = X or * as defined in Table 2
MKLMETLNQCINAGHEMTKAIAIAQFNDDSPEARKITRRWRIGEAADLVGVSSQAIRDAEKAGRLPHPDMEIRGRVEQRVGYTIEQINHMRDVFGTRLRRAEDVFPPVIGVAAHKGGVYKTSVSVHLAQDLALKGLRVLLVEGNDPQGTASMYHGWVPDLHIHAEDTLLPFYLGEKDDVTYAIKPTCWPGLDIIPSCLALHRIETELMGKFDEGKLPTDPHLMLRLAIETVAHDYDXFVQLYNQHVAQPVLGISISGCGSRPAFSASLIAXEETPTKSAASPILQRRVIFLASGLSSLNCAMAIAFVIS

SEQ ID NO: 10941 - protein, 606 aa, Homo sapiens
  misc_feature (1)...(606): Xaa = X or * as defined in Table 2
ETPYVSLYAFWLFSFAKAXVAPPSGFSPTVVSSDSWLGSLVPYTLIARTPELIFVVRQQVLDVERGAAACGXFLPRLVGXVPDLDAVGLYSTAPIIXGAIPGQGQXGLRMSEAQGVPAGGSGLSTTVRLTWACLLPSLFSTSSVXQPQCSWRAARMVSLLPFSLFSTFMCSLSWICFRNFIQVQVMGXVPVTLPNSSTDSPARTFWSSGNWMIXGGIAAFGGVLGAGFFFTVASPLSSXHGRKRALGPPGFHLWGLGVLTGWSIIHGDLAGALRLASVILGYTLVXASVLRQCLLDGDGQSEPSWERMMNLVVLMVFPFSVQMMVAGGSEDTWHWSSSFLPSATXTSCSFCLKAGAVPWLSDLFSLSVVPAWPLLQFTSFLTSFLSSSLLADFRFSSGLALPMGFRVSAGLALPIGFRVSAGLALPTGFKGPEGCALLRGLELSTALAFRVSALLLPFSAGNFFLPPSTERKSGVAGFGGGTFSGTGVLEVPFLARTERKSTCWGLCTFLSSSDTVFGFTCRCRLARKSICSAGISFRSSSDRVFVLTFFPRRSRKSSCSTSCWRIASSVCCLVSTRLFSTPRTSSPSSSSSQPCPLAGQPGLRDP

SEQ ID NO: 10942 - protein, 988 aa, Homo sapiens
  DOMAIN (340)..(356): REGULATORY PROTEIN ROP SIGNATURE domain identified by eMATRIX, accession number PR00835B, p-value=1.000e-19, raw score of 11.52
MTIVAALMTVFFIMQLVGQVPAALWVIFGEDRFRWSATMIGLSLAVFGILHALAQAFVTGPATKRFGEKQAIIAGMAADALGYVLLAFATRGWMAFPIMILLASGGIGMPALQAMLSRQPNFDHWTADRHGDLCRLGEHMERVGMDCRRRPIPCLPPRVASRCMEPGHLDMNGSRRHLANGFTTPRIGANQFLRRTVNAQTNPWQNISIASAISSSRTRRISGSVGSWPRSGNAEVSALHHYVPDLHRRMLLATLWNTYICINEALALTLSDFSLVPPHPYRQLFTLTTFHNRACSSSVTRIVSILSRFIGIITPMNRNPPYTEASVTKQEKTALNMARFIRSQTLTLLEKLNELDADEQADICESLHDHADELYRSCLARFGDDGENSDTCSSRRRSQLVCKRMPGADKPLNQTFIDYRTGRLQPAIPQSLPEALRLAADLAEQKQRLEQKMLMDAPKVEFAERVATASGVLIGNYAKVLGLGQNYLFTWLRDNGILIATGERRNVPKQEYISRGYFTLKETVIDTSNGSRISFTTRITGKGQQWLMKRLLDAGVLVPVAATLTDVVRTTSIVMLAKVTFLSCITMSDFTFSGYELACFVTHSGLSRSAGHILSQCANLAATTSEYFIHKPHRLIAAETGYSQSTVVRAFREAVNKGILSVEIVIGDHRERGANLDRVTPSFLALAQQAKSALTESKLKISSAATKILYAGRIVAGITGATGAVAGAYIADITDGEDRARHFGLMSACFGVGMVAGPVAGGLLGAISLHAPFLAAAVLNGLNLLLGCFLMQESHKGERRPMPLRAFNPVSSFRWARGMTIVAALMTVFFIMQLVGQVPAALWVIFGEDRFRWSATMIGLSLAVFGILHALAQAFVTGPATKRFGEKQAIIAGMAADALGYVLLAFATRGWMAFPIMILLASGGIGMPALQAMLSRQLTSIIGPLIVTAIYAASASTWNGLAWIVGAALYLVCLPALRRGAWSRATST

SEQ ID NO: 10943 - protein, 187 aa, Homo sapiens; identical to SEQ ID NO: 10931

SEQ ID NO: 10944 - protein, 143 aa, Homo sapiens
  DOMAIN (57)..(90): ESICULAR LUMEN DOMAIN domain identified by eMATRIX, accession number DM01292C, p-value=4.672e-09, raw score of 12.45
PGCIRCKCVAVDGDPCMKSNNALIVILGTVTLDAVGIGLVMPVLPGLLRDIVHSDSIASHYGVLLALYALMQFLCAPVLGALSDRFGRRPVLLASLLGATIDVSCPCSRMLFLTTDVLLPLMFIKKLGANVAFLSSKKPLFVM

SEQ ID NO: 10945 - protein, 1322 aa, Homo sapiens
  DOMAIN (888)..(941): C-terminal cystine knot proteins domain identified by eMATRIX, accession number BL01185D, p-value=8.800e-16, raw score of 23.45
VCTGSSTRHIVTFDGQNFKLTGSCSYVLFQNKEQDLEVILHNGACSPGARQGCMKSIEVKHSALSVELHSDMEAFRFLVHGHPYSITTACFLVKLCKVKLCFLVKLFFILEELPTNIKVTVNGRLVSVPYVGGNMEVNVYGAIMHEVRFNHLGHIFTFTPQNNEFQLQLSPKTFASKTYGLCGICDENGANDFMLRDGTVTTDWKTLVQEWTVQRPGQTCQPILEEQCLVPDSSHCQVLLLPLFAECHKVLAPATFYAICQQDSCHQEQVCEVIASYAHLCRTNGVCVDWRTPDFCAMSCPPSLVYNHCEHGCPRHCDGNVSSCGDHPSEGCFCPPDKVMLEGSCVPEEACTQCIGEDGVQHQFLEAWVPDHQPCQICTCLSGRKVNCTTQPCPTAKAPTCGLCEVARLRQNADQCCPEYECVCDPVSCDLPPVPHCERGLQPTLTNPGECRPNFTCACRKEECKRVSPPSCPPHRLPTLRKTQCCDEYECACNCVNSTVSCPLGYLASTATNDCGCTTTTCLPDKVCVHRSTIYPVGQFWEEGCDVCTCTDMEDAVMGLRVAQCSQKPCEDSCRSNTVPYKLLGKCQVTSWGSPNLHVGEQYWDRVFVLYGRLALREWRLDPSHPECASRASLTFCMKASAVEGACHLPVGSQWASPENPCLINECVRVKEEVFIQQRNVSCPQLEVPVCPSGFQLSCKTSACCPSCRCERMEACMLNGTVIGPGKTVMIDVCTTCRCMVQVGVISGFKLECRKTTCNPCPLGYKEENNTGECCGRCLPTACTIQLRGGQIMTLKRDETLQDGCDTHFCKVNERGEYFWEKRVTGCPPFDEHKCLAEGGKIMKIPGTCCDTCEEPECNDITARLQYVKVGSCKSEVEVDIHYCQGKCASKAMYSIDINDVQDQCSCCSPTRTEPMQVALHCTNGSVVYHEVLNAMECKCSPRKCSKGDTGIFLKWSCIPAEKGLQTSGAWVEAADIPLLPGSPRRLSPQAGSRGGQGPKHGQQCLKMPGPRAPGLQGGSNRDPGQPCGGESTRSSSVINNYLDANEPVSLEARLSRMHFHDSQRKVDYVLAYHYRKRGVHLAQGFPGHSLAIVSNGETGKEPHAGGPGDIELGPLDALEEERKEQREEFEHNLMEAGLELEKDLEVWQSLDVWHLNLNCSTESKGDILGQVPAALWVIFGEDRFRWSATMIGLSLAVFGILHALAQAFVTGPATKRFGEKQAIIAGMAADALGYVLLAFATRGWMAFPIMILLASGGIGMPALQAMLSRQLTSIIGPLIVTAIYAASASTWNGLAWIVGAALYLVCLPALRRGAWSRATST

SEQ ID NO: 10946 - protein, 740 aa, Homo sapiens
  DOMAIN (116)..(162): kw TRANSCRIPTASE REVERSE II ORF2 domain identified by eMATRIX, accession number DM01354O, p-value=1.000e-40, raw score of 8.73
KRHKKPFKKSTNPGAGFFEKINKIDRLLARLIKKKREKNQIDAIKNDKGDITTDPTEMQTTVREYYKHLYVNKPENLEEMDKFLDTYTLPRLNQEELESLNKPITGSEIEAIINSLPTKKSPGPDGFTAEFYQRYKEELLPFLLKLFQSIEKEGILPNSFYEASIILIPKPGRDTTKKENFRPISLMNIDANILNNILANQIQQHIKKLIHHDEVGFIPGMQGWFNIRKSINLIPHVNRTKDKNHMVISVDAEKAFDKIQQHFMLKTLNKLGIDGTYLKIIRPIFDKPTADIILNRQKLEALPLKTGTRQRCSLSPLLFNIVLEVLARAIRQEKEIKGIQLGKEEVKLSLFADDMIVYLENPIVSAQNLLKLIGNFSKVSEYTINVQKSQSFLYTNNRQTESQIMSELPFTIASKRIKYLGIQLTREVKDFFKENYKPLLDEIKENTNKWKNIPWSWVGRIDIVKMAILPKQMPDVNVSWDGEGPKQLPFIDISVAVATDKGLLTPIIKDAAAKGIQEIADSVRSNIVLQCQARPMPLRAFNPVSSFRWARGMTIVAALMTVFFIMQLVGQVPAALWVIFGEDRFRWSATMIGLSLAVFGILHALAQAFVTGPATKRFGEKQAIIAGMAADALGYVLLAFATRGWMAFPIMILLASGGIGMPALQAMLSRQVDDDHQGQLQGSLAALTSLTSIIGPLIVTAIYAASASTWNGLAWIVGAALYLVCLPALRRGAWSRATST

SEQ ID NO: 10947 - protein, 94 aa, Homo sapiens
  misc_feature (1)...(94): Xaa = X or * as defined in Table 2
GELYFQVCGQFWNRCGVVMKKMYILLFLSGEFCRCLXYSLMVVCISVGSVVISPLSFFIVSIXFFSLFFFISLASSLSILLILSKNQLLDSLIF

SEQ ID NO: 10948 - protein, 1415 aa, Homo sapiens
  DOMAIN (357)..(373): REGULATORY PROTEIN ROP SIGNATURE domain identified by eMATRIX, accession number PR00835B, p-value=1.000e-19, raw score of 11.52
MPLRAFNPVSSFRWARGMTIVAALMTVFFIMQLVGQVPAALWVIFGEDRFRWSATMIGLSLAVFGILHALAQAFVTGPATKRFGEKQAIIAGMAADALGYVLLAFATRGWMAFPIMILLASGGIGMPALQAMLSRQPNFDHWTADRHGDLCRLGEHMERVGMDCRRRPIPCLPPRVASRCMEPGHLDLNGSRRHLANGFTTPRIGANQFLRRTVNAQTNPWQNISIASAISSSRTRRISGSVGSWPRSGNAEVSALHHYVPDLHRRMLLATLWNTYICINEALALTLSDFSLVPPHPYRQLFTLTTFHNRACSSSVTRIVSILSRFIGIITPMNRNPPYTEASVTKQEKTALNMARFIRSQTLTLLEKLNELDADEQADICESLHDHADELYRSCLARFGDDGLGGGQSCRTVLRERVRIEIASTHIALQHAIVTGDAVGMDDIPQEARQYRHNQAYAYSIQGDGAEDDDERIFRTLKEYLSHEQDMLRLRIMIWRTLATDTFDIALPVNQSFDVWATIIRGKFQTVYRDIIERVKSSDSCDVSGSEVLKFHVIRTPSTSQAPCMKSNNALIVILGTVTLDAVGIGLVMPVLPGLLRDIVHSDSIASHYGVLLALYALMQFLCAPVLGALSDRFGRRPVLLASLLGATIDYAIMATTPVLWICLAGLPQFFNLPAQLFVLNFSIPFGIPFYDGGRVIKHLITLATASQNGHSLFLPVLNESLAIKDWHRLGYAGTAGPLAGYRPFRQHRQSLWRAVALYALMQFLCAPVLGALFDRFAAAKSCNFATWSHYRLRDHATTPVLWICLAGLPQFFNLPAQLFVLNFSIRFGIPFYDGGRVIKHLITLATASQNGHSLFLPVLNGSKALEYSNGIFDCQSPTSPFMGSLRALHLVEDLRGLLEMMETDEKEGLRCQIPDSTAETLVEWLQSQMTNRRILNSSRTKKINIMFIPYFKIHCLHSALGVAETEKETAEHLDLAGASSRPKDSQRNSPFQIPPPSPDSKKKSRGIMKLFGNLGPYGGHRRSNQRAYTSRPFLFISSNIGSSMSMRQPGSPGCRMCSEAAKRSYWRSKTRYMFLIALWPCLYRQCYFSVNRALWPRRTFSSVFQRVFDQRFNVGINTRFNFELIGTDGYLVLRWLITLDTKADVVDVGAVAGAYIADIPDGEDRARHFGLMSACFGVGMVAGPVAGGLLGAISLHAPFLAAAVLNGLNLLLGCFLMQESHKGERRPMPLRAFNPVSSFRWARGMTIVAALMTVFFIMQLVGQVPAALWVIFGEDRFRWSATMIGLSLAVFGILHALAQAFVTGPATKRFGEKQAIIAGMAADALGYVLLAFATRGWMAFPIMILLASGGIGMPALQAMLSRQLTSIIGPLIVTAIYAASASTWNGLAWIVGAALYLVCLPALRRGAWSRATST

SEQ ID NO: 10949 - protein, 70 aa, Homo sapiens; identical to SEQ ID NO: 9800
  misc_feature (1)...(70): Xaa = X or * as defined in Table 2

SEQ ID NO: 10950 - protein, 348 aa, Homo sapiens
  DOMAIN (306)..(328): COMPLEMENT C1Q DOMAIN SIGNATURE domain identified by eMATRIX, accession number PR00007C, p-value=1.900e-15, raw score of 15.60
GSLQGCAASCARAFLRTCCARSESGLAVRGTKGVAFGENPRAAGTCSQSPFFPVAPPPGVRLWVLCPDRFTGAFLLRTTLALNVRAGDEGPRRLLRAPRVPSRPSAPLAPAPASTPARRLPPVPMQAPGRGPLGLRLMMPGRRGALREPGGCGSCLGVALALLLLLLPACCPVRAQNDTEPIVLEGKCLVVCDSSPSADGAVTSSLGISVRSGSAKVAFSATRSTNHEPSEMSNRTMTIYIDQVFSNIGHHFDLASSIFVAPRKGIYSFSFHVVKVYNRQTIQVSLLLNGYPVISAWAGYQDVTGEAASNGVLLLMEREDKVHLKLERGNLMGGWKYSTFSGFLVFPL

SEQ ID NO: 10951 - protein, 133 aa, Homo sapiens
  misc_feature (1)...(133): Xaa = X or * as defined in Table 2
KGASSPVQVPGPVAASTEALLQEAQCSGLSWVVALPQVKQEKADTQDEWTPGTAVLTSPVLVPGCPSKAVDPGLPSVKQEPPDPEEDKEENKDDSASKLAPEEEITEIFSLGGPRFRDTAVXLPRSKDLKKPR

SEQ ID NO: 10952 - protein, 61 aa, Homo sapiens
MNMACLGCFVVALIILPFSNPAPPPLKSNFLYSGSWEEKMHQLSTLSLPFPLTSSRSSKYS

SEQ ID NO: 10953 - protein, 496 aa, Homo sapiens
  misc_feature (1)...(496): Xaa = X or * as defined in Table 2
MIREQKIYHKYLAQRREEEKAQEKEFDRILEEDKAKKLAEKDKELRLEKEARRQLVDEVMCTRKLQVQEKSQYVKLLLAAHPTGDRIRSKVELTRYLGPACDLTLFDFKQGILCYPAPKAHPVAVASKKRKKPSRPAKTRKRQVGPQSGEVRKEAPRDETKADTDTAPASFPAPGCCENCGISFSGDGTQRQRLKTLCKDCRAQRIAFNREQRMFKQPYTNRRQNRKCGACAACLRRMDCGRCDFCCDKPKFGGSNQKRQKCRWRQCLQFAMKRLLPSVWSESEDGAGSPPPYRRRKRPSSARRHHLGPTLKPTLATRTAQPDHTQAPTKQEAGGGFVLPPPGTDLVFLREGASSPVQVPGPVAASTEALLQEAQCSGLSWVVALPQVKQEKADTQDEWTPGTAVLTSPVLVPGCPSKAVDPGLPSVKQEPPDPEEDKEENKDDSASKLAPEEEAGGAGTPVVTSVDSIYPERQLXVSSWSYLHSCGTERYPCGSI

SEQ ID NO: 10954 - protein, 586 aa, Homo sapiens
MAEDWLDCPALGPGWKRREVFRKSGATCGRSDTYYQSPTGDRIRSKVELTRYLGPACDLTLFDFKQGILCYPAPKAHPVAVASKKRKKPSRPAKTRKRQVGPQSGEVRKEAPRDETKADTDTAPASFPAPGCCENCGISFSGDGTQRQRLKTLCKDCRAQRIAFNREQRMFKRVGCGECAACQVTEDCGACSTCLLQLPHDVASGLFCKCERRRCLRIVERSRGCGVCRGCQTQEDCGHCPICLRPPRPGLRRQWKCVQRRCLRGKHARRKGGCDSKMAARRRPGAQPLPPPPPSQSPEPTEPQPYTIPPAEPQVRGLCSLPTAEWMWPLRFCCDKPKFGGSNQKRQKCRWRQCLQFAMKRLLPSVWSESEDGAGSPPPYRRRKRPSSARRHHLGPTLKPTLATRTAQPDHTQAPTKQEAGGGFVLPPPGTDLVFLREGASSPVQVPGPVAASTEALLQAVDPGLPSVKQEPPDPEEDKEENKDDSASKLAPEEEAGGAGTPVITEIFSLGGTRFRDTAVWLPSLQGRHSGREDGCKVWETEDTVEPTSTSWNPRGWPGTHVSLSPPPASMMWVSCRRSWCPSSQS

SEQ ID NO: 10955 - protein, 549 aa, Homo sapiens
MAEDWLDCPALGPGWKRREVFRKSGATCGRSDTYYQSPTGDRIRSKVELTRYLGPACDLTLFDFKQGILCYPAPKAHPVAVASKKRKKPSRPAKTRKRQVGPQSGEVRKEAPRDETKADTDTAPASFPAPGCCENCGISFSGDGTQRQRLKTLCKDCRAQRIAFNREQRMFKRVGCGECAACQVTEDCGACSTCLLQLPHDVASGLFCKCERRRCLRIVERSRGCGVCRGCQTQEDCGHCPICLRPPRPGLRRQWKCVQRRCLRGKHARRKGGCDSKMAARRRPGAQPLPPPPPSQSPEPTEPHPRALAPSPPAEFIYYCVDEDELQRLLPSVWSESEDGAGSPPPYRRRKRPSSARRHHLGPTLKPTLATRTAQPDHTQAPTKQEAGGGFVLPPPGTDLVFLREGASSPVQVPGPVAASTEALLQEAQCSGLSWVVALPQVKQEKADTQDEWTPGTAVLTSPVLVPGCPSKAVDPGLPSVKQEPPDPEEDKEENKDDSASKLAPEEEAGGAGTPVITEIFSLGGTRFRDTAVWLPRSKDLKKPGARKQ

SEQ ID NO: 10956 - protein, 606 aa, Homo sapiens
MAEDWLDCPALGPGWKRREVFRKSGATCGRSDTYYQSPTGDRIRSKVELTRYLGPACDLTLFDFKQGILCYPAPKAHPVAVASKKRKKPSRPAKTRKRQVGPQSGEVRKEAPRDETKADTDTAPASFPAPGCCENCGISFSGDGTQRQRLKTLCKDCRAQRIAFNREQRMFKRVGCGECAACQVTEDCGACSTCLLQLPHDVASGLFCKCERRRCLRIVERSRGCGVCRGFQTQEDCLGHCPICLRPPRPGLRRQWKCVQRRCLRGKHARRKGGCDSKMAARRRPGAQPLPPPPPSQSPEPTEPHPRALAPSPPAEFIYYCVDEDELQPYTNRRQNRKCGACAACLRRNGCGRCDFCCDKPKFGGSNQKRQKCRWRQCLQFAMKRLLPSVWSESEDGAGSPPPYRRRKRPSSARRHHLGPTLKPTLATRTAQPDHTQAPTKQEAGGGFVLPPPGTDLVFLREGASSPVQVPGPVAASTEALLQEAQCSGLSWVVALPQVKQEKADTQDEWTPGTAVLTSPVLVPGCPSKAVDPGLPSVKQEPPDPEEDKEENKDDSASKLAPEEEAGGAGTPVITEIFSLGGTRFRDTAVWLPRSKDLKKPGARKQ

SEQ ID NO: 10957 - protein, 574 aa, Homo sapiens
MAEDWLDCPALGPGWKRREVFRKSGATCGRSDTYYQSPTGDRIRSKVELTRYLGPACDLTLFDFKQGILCYPAPKAHPVAVASKKRKKPSRPAKTRKRQVGPQSGEVRKEAPRDETKADTDTAPASFPAPGCCENCGISFSGDGTQRQRLKTLCKDCRAQRIAFNREQRMFKRVGCGECAACQVTEDCGACSTCLLQLPHDVASGLFCKCERRRCLRIVERSRGCGVCRGCQTQEDCGHCPICLRPPRPGLRRQWKCVQRRCLRHLAHRLRRRHQRCQRRTPLAVAPPTGKHARRKGGCDSKMAARRRPGAQPLPPPPPSQSPEPTEPHPRALAPSPPAEFIYYCVDEDELKRLLPSVWSESEDGAGSPPPYRRRKRPSSARRHHLGPTLKPTLATRTAQPDHTQAPTKQEAGGGFVLPPPGTDLVFLREGASSPVQVPGPVAASTEALLQEAQCSGLSWVVALPQVKQEKADTQDEWTPGTAVLTSPVLVPGCPSKAVDPGLPSVKQEPPDPEEDKEENKDDSASKLAPEEEAGGAGTPVITEIFSLGGTRFRDTAVWLPRSKDLKKPGARKQ

SEQ ID NO: 10958 - protein, 649 aa, Homo sapiens
  misc_feature (1)...(649): Xaa = X or * as defined in Table 2
MAEDWLDCPALGPGWKRREVFRKSGATCGRSDTYYQSPTGDRIRSKVELTRYLGPACDLTLFDFKQGILCYPAPKAHPVAVASKKRKKPSRPAKTRKRQVGPQSGEVRKEAPRDETKADTDTAPASFPAPGCCENCGISFSGDGTQRQRLKTLCKDCRAQRIAFNREQRMFKRVGCGECAACQVTEDCGACSTCLLQLPHDVASGLFCKCERRRCLRIVERSRGCGVCRGCQTQEDCGHCPICLRPPRPGLRRQWKCVQRRCLRHLAHRLRRRHQRCQRRTPLAVAPPTGKHARRKGGCDSKMAARRRPGAQPLPPPPPSQSPEPTEPHPRALAPSPPAEFIYYCVDEDELQPYTNRRQNRKCGACAACLRRMDCGRCDFCCDKPKFGGSNQKRQKCRWRQCLQFAMKRLLPSVWSESEDGAGSPPPYRRRKRPSSARRHHLGPTLKPTLATRTAQPDHTQAPTKQEAGGGFVLPPPGHXTLCFLREGASSPVQVPGPVAASTEALLQEAQCSGLSWVVALPQVKQEKADTQDEWTPGTAVLTSPVLVPGCPSKAVDPGLPSVKQEPPDPEEDKEENKDDSASKLAPEEEAGGAGTPVITEIFSLGGTRFRDTAVWLPSLQGRHSGREDGCKVWETEDTVEPTSTSWNP

SEQ ID NO: 10959 - protein, 558 aa, Homo sapiens
LCDTPPGRGGGGRGGGRGGRLQEGPSFMGPRGLEWRKIPAWLPNWLLLLPVASMAEDWLYCPALGPGWKRREFFRKSRATCGRLNTYYQSPTGDRILSKVELTRYLGPACDLTLFDFKQGILCYPSPQRPIPLGGLPGKKRKKPSRPAKTRKRQVGPQSGEVRKEAPRDETKADTDTAPASFPAPGCCENCGISFSGDGTQRQRLKTLCKDCRAQRIAFNREQRMFKRVGCGECAACQVTEDCGACSTCLLQLPHDVASGLFCKCERRRCLRIVERSRGCGVCRGCQTQEDCGHCPICLRPPRPGLRRQWKCVQRRCLRGKHARRKGGCDSKMAARRRPGAQPLPPPPPSQSPEPTEPHPRALAPSPPAEFIYYCVDEDELKRLLPSVWSESEDGAGSPPPYRRRKRPSSARRHHLGPTLKPTLATRTAQPDHTQAPTKQEAGGGFVLPPPGTDLVFLREGASSPVQVPGPVAASTEALLQAVDPGLPSVKQEPPDPEEDKEENKDDSASKLAPEEEAGGAGTPVITEIFSLGGTRFRDTAVWLPRSKDLKKPGARKQ

SEQ ID NO: 10960 - protein, 192 aa, Homo sapiens
  misc_feature (1)...(192): Xaa = X or * as defined in Table 2
QVYRPSQTPHLALSPERVAPGRLAGGRLAPEARAPRGSPLPPHRVSEKTIRVMVFHPGARRAGGTPPRAPRGDTGGAPGAPTYSTPLMSLHRARLESSSTGSSFPADSAKPVPLAVVSLDSRXGQWESRSSIHAVTNXASSSSSSSSSSSFSRVYPRFIEFLHFDIQSTGQRITSRQHPPRDFRDALFXLNS

SEQ ID NO: 10961 - protein, 129 aa, Homo sapiens
SPLNKVQLINELNEREVQLGVANKVSWHSEYKDSAWIFLGGLPYDLTKGDIICVFSQQRSTIVAVDNFNGIKIKGRTIRVDHVSNYRAPKDSEEIDDVTRQLQEKGCGARTPSPSLSESSEDEKPTKKP

SEQ ID NO: 10962 - protein, 45 aa, Homo sapiens
ARTPSPSLSESSEDEKPTKKHKKGKALRLKRRFWVVLMSALPCIH

SEQ ID NO: 10963 - protein, 73 aa, Homo sapiens
  DOMAIN (53)..(72): Eukaryotic  RNA-binding region RNP-1 proteins domain identified by eMATRIX, accession number BL00030A, p-value=7.857e- 09, raw score of 14.39
SPPPPFLSAEREPEEMNPLTKVKLINELNEREVQLGVADKVSWHSEYKDSAWIFLGGLPYELTEGDIICVFSQ

SEQ ID NO: 10964 - protein, 390 aa, Homo sapiens
  DOMAIN (355)..(382): Protamine P1 proteins domain identified by eMATRIX, accession number BL00048, p-value=6.684e-10, raw score of 6.39
SPLTRVKLINELNEREVQLGVADKVFWHSEYKDSAWIFLGGLPYELTEGDIICVFSQYGEIVNINLVRDKKTGKSKGFCFLCYEDQRSTILAVDNFNGIKINGRTIRVDHVSNYRAPKDSEEIDDVTRQLQEKGCGARTPSPSLSESSEDEKPTKKHKKAPQNATVFGDKVFEEVTQDGNYLVQPLDISKVTDIQVGFSEALSWRPRQWLLHAAAKVVLLMHIPHFLAYKKEKKKKKKEKEKADREVQAEQPSSSSPRRKTVKEKDDTGPKKHSSKNSERAQKSEPREGQKLPKSRTAYSGGAEDLERELKKEKPKHEHKSSSRREAREEKTRIRDRGRSSDAHSSWYNGRSEGRSYRSRSRSRDKSHRHKRARRSRERESSNPSDRWRH

SEQ ID NO: 10965 - protein, 332 aa, Homo sapiens
  DOMAIN (297)..(324): Protamine P1 proteins domain identified by eMATRIX, accession number BL00048, p-value=6.684e-10, raw score of 6.39
FLSAEREPEEMNPLTKVKLINELNEREVQLGVADKVSWHSEYKDSAWISLGGLPYELTEGDIICVFSQYGEIVNINLVRDKKTGKSKGFCFLCYEDQRSTILAVDNFNGIKIKGRTIRVDHVSNYRAPKDSEDIDDVTRQLQEKGSGARPPSPTLSESSEDEKPTKKHKKDKKEKKKKKKEKEKADREVQAEQPSSSSPRRKTVKEKDDTGPKKHSSKNSERAQKSEPREGQKLPKSRTAYSGGAEDLERELKKEKPKHEHKSSSRREAREEKTRIRDRGRSSDAHSSWYYWRSEGRSYRSRSRSRDKSHRHKRARRSRERESSNPSDRWRH

SEQ ID NO: 10966 - protein, 25 aa, Homo sapiens
PRANKHFFLLFFSMLQEKEREFQEV

SEQ ID NO: 10967 - protein, 331 aa, Homo sapiens [sequence omitted]

SEQ ID NO: 10968 - protein, 191 aa, Homo sapiens
LFCLFFHILQPSHCWISEMVVQLSDSLTDLLDKFSNISEGLSNYSIIDKLVNIVDDLVECVKENSSKDLKKSFKSPEPRLFTPEEFFRIFNRSIDAFKDFVVASETSDCVVSSTLSPEKGKAKNPPGDSSLHWAAMALPALFSLIIGFAFGALYWKKRQPSLTRAVENIQINEEDNEISMLQEKEREFQEV

SEQ ID NO: 10969 - protein, 105 aa, Homo sapiens
  DOMAIN (50)..(99): Eukaryotic RNA polymerase II heptapeptide repeat proteins domain identified by eMATRIX, accession number BL00115Z, p-value= 3.515e-09, raw score of 3.12
  misc_feature (1)...(105): Xaa = X or * as defined in Table 2
SPTTRRGTPGTCLKPTACAGAAXPGCSARRTCASAAPLSTCPPSSCAAPPPAPAAVPSTPRPTSPSPWAAPASPSRRRTQTASTPASTNRAPSSCWAPTTRPLAP

SEQ ID NO: 10970 - protein, 151 aa, Homo sapiens
  misc_feature (1)...(151): Xaa = X or * as defined in Table 2
GVPNNFIINKNKTPSGWLQPLPRWLXAPVGGACHYPGLEARTEERAPCPSKYTGEPEVLRIKNQGGTPRPGGGPGPSAPRGSFLWSTPGSCPSITPHSLPAARPLPPTPRHPAPSSPPCTESAPSGPSSSQAPGITVAPGISQVQRAAALR

SEQ ID NO: 10971 - protein, 109 aa, Homo sapiens
IEKISLEPKNRPSPQIPNLVGPRLFLVPGDFQSQVPNFLPFKPSSGPHPAAGKGQPFSFLPAWRSTGPERATPGPGRPAACSALEAPSLRGPSGYSAQEPPRRPISARI

SEQ ID NO: 10972 - protein, 173 aa, Homo sapiens
VSLINLQVLRQSLEQVTETFTSYFKPSCQPPTSPIRAMKWTELRFLSCLPAGRQHYLLPATPPCSVRGVHGKPSTVPPAAPSPTSAQSHQPASHPLSSPTFLFEPIKDAGTHASLFSRDRHLPFPTCHIRRPPQPCLSPPHCSQGSRTGRAVTAALRMAAAAAMTGNQSPTRI

SEQ ID NO: 10973 - protein, 128 aa, Homo sapiens
  DOMAIN (45)..(67): N-acetyl-gamma-glutamyl-phosphate reductase proteins domain identified by eMATRIX, accession number BL01224A, p-value=7.171e- 09, raw score of 15.62
AAAALAAASLLLRREDPGPGAGPSMAETEALSKLREDFRMQNKSVFILGASGETGRVLLKEILEQGLFSKVTLIGRRKLTFDEEAYKNVNQEVGGLLKSLDDYASAFQGHDLGFCCLGYHQEGKAGGG

SEQ ID NO: 10974 - protein, 144 aa, Homo sapiens
  misc_feature (1)...(144): Xaa = X or * as defined in Table 2
FMEYLTLSFIHVLLQXFIHCFVHLFIHSFFYALMKSLIQXFIHLYSCFICIDLLISSCIYSFIYALVKSLANSLTHSFIHTFLQXFVHLFTPLLICSFTHSSIHXPSHSLTFIQLHLFFHALVSGFIWSFIYLFCKINVFLIDK

SEQ ID NO: 10975 - protein, 291 aa, Homo sapiens
TALVPRDKDWQSPDTLKTGICRCYFPSMAETEALSKLREDFRMQNKSVFILGATVETGRVLLKEILEQGLFSKVTLIGRRKLTFDEEAYKNVNQEVVDFEKLDDYASAFQGHDVGFCCLGTTRGKAGAEGFVRVDRDYVLKSAELEKAGGCKHFNLLSSKGADKSSNFLYLQVKGEVEAKVEELKFDRYSVFRPGVLLCDRQESRPGEWLVRKFFGSLPDSWARGHSVPVVTVVRAMLNNVVRPRDKQMELLENKAIHGPGGKRHGSSQGHDHTGRNGFYLFNLNTHDQIG

SEQ ID NO: 10976 - protein, 88 aa, Homo sapiens
  misc_feature (1)...(88): Xaa = X or * as defined in Table 2
PTRSTSSGSYMKRRSGSCSPMISDTSVVLSMDNSRSSRAVVVKKIETRDGKLVSESSDVLPKXTAAAAPPSLPLLRCPRAWEGGRYAW

SEQ ID NO: 10977 - protein, 138 aa, Homo sapiens
  DOMAIN (18)..(66): Intermediate filaments proteins domain identified by eMATRIX, accession number BL00226B, p-value=1.273e-28, raw score of 23.86
  misc_feature (1)...(138): Xaa = X or * as defined in Table 2
DIEECESMHXDDIRKHTEMENEFALIKKDMDEAYKNKVELESHLEGLTEEISFLTQLYEEEIRELHVPDLGHICGAVHXQQSLPGHEQHHRXGQGTVRGDRQPQPGXGXEHEIKYEELQTLAWKHGMTRGAQRLRSPR

SEQ ID NO: 10978 - protein, 83 aa, Homo sapiens
LENQSPRHVYSLSLLKSKNDVMLLDTAIFCPEATSEALDVVTSWASEAGTEELAFGFGLVSLSYCKLSTSLSVASSFVGGDWL

SEQ ID NO: 10979 - protein, 1315 aa, Homo sapiens
  DOMAIN (430)..(478): Intermediate filaments proteins domain identified by eMATRIX, accession number BL00226B, p-value=9.036e-31, raw score of 23.86
AEVAHARWERCFFSPTPFLWGCFRDRLLPGRRACFRRAGRLKRGSYNCSQLWLCVEKALAMDRSGFGEISSPVIREAEVTRTARKQSAQKRVLLQASQDENFGNTTPRNQVIPRTPSSFRQPFTPKSRSLLRQPDISCILGTGGKSPRLTQSSGFFGNLSMVTNLDDSNWAAAFSSQRSGLFTNTEPHSITEDVTISAVMLREDDPGEAASMSMFSDFLQSFLKHSSSTVFDLVEEYENICGSQVNILSKIVSRATPGLQKFSKTASMLWLLQQEMVTWRLLASLYRVTQKSFKVSNSGPRAFSSHSYMCGPSACISSSSFSRMGSSSFRGSLGGDFGRASGRGGITPVTVNQSLLSPLNLEVDPNIQAVCTQVKEQIKTLNNKFASFIDKLYTLGQEKLKLEVELDNMQGLVEDFKNKYEDDIKKHTEMENEFVLIKKDMDEAYKNKVELESHLEGLTEEISFLRQLYEEEIRELQSQISDTSVVLSIDNSRSLDMNSIIAETEISKMNRNISRLQDEIEGLKGQRASLEAAIADAEQHGELAVKDANTKLSKLEAVNASEKTVVEALFQRDSLVRQSQLVVDWLESIAKDEIGEFSDNIEFYAKSVYWENTLHTLKQRQLTSYVGSVRPLVTELDPDAPIRQKMPLDDLDREDEVRLLKYLFTLIRAGMTEEKSSVLVTIVTRQITSQLSGVKRPLYYAHGFRGGLSPREVHIRKHLAHGTPVLAAQCRGSKSAYLGREEARTSFLVLKNAGKPVGLVPDLLSLSIIVDFLLNISFPTSIQRATWRENQFLKRCPEKSWSQTVSAVGVPVPTVKPSDFVEGSVAQIRSALSGFLRYVLNERTADRRDFVSPLRSLHSPVSLKRTYRETGSDSASLHPGEINSLVAHTKPVWWSLHTDVRERYHVGSESKKQEDLFPWGLKEENCAGNRTWSLQWEEYEKGSYSVKLDGPGLQRITLEMAEEPSASSEGLPAFAGSHLRAWRQEPGAYGDTGDGAEHQQHEAPKRAIFACEGSGPISQVIASSVDDTICGPIRLEKKFSVTSEKYPFSFLKASGNGHLSGSLQGHILAIRVYLSPLVYKEENRGTRGAHAIGPTANKTCNSSHKPKPLGKEILYSHSKETGMEKFLQTPVPWAWGRVEEAEVWDQFQEQRGIVSRIKQPTRKPASLERDGYIVHIDRNISSLHKDSWAHSMTWEQQKIIKTEDRDDKLSGLPCETLKETFPDHPIGRRLAALIDVHILIPETCEYVTLHGKRGLAGIERAEDLNVLFLEKGDGCPDGKDNPCPFMYRYGFQSAYRAVLDDLRNPPLKFLHRQKL

SEQ ID NO: 10980 - protein, 163 aa, Homo sapiens
  DOMAIN (10)..(57): Intermediate filaments proteins domain identified by eMATRIX, accession number BL00226D, p-value=6.000e-30, raw score of 19.10
  misc_feature (1)...(163): Xaa = X or * as defined in Table 2
GCQRQVVPSWRPPLQRAKQDMAWQLLEYQELMNIKLALDIEIATYRKLLEGEESQLDSGMQNMSIHTKTTGGYAGGLSSAYGDLTDPGLSYSLGSSFGSGAGSSSFSRTSSSRAVVVKKIETRDGKLVSESSDVLPKXTAAAAPPSLPLLRCPRAWEGGRYAG

SEQ ID NO: 10981 - protein, 824 aa, Homo sapiens
  DOMAIN (747)..(768): POLYCYSTIC KIDNEY DISEASE PROTEIN SIGNATURE domain identified by eMATRIX, accession number PR00500B, p-value=4.316e-09, raw score of 7.74
MPGYSALSNKPMLETTQMSITRGMGKLLVVRCGTEKAGPAVPGGMEGPRSSTHVPLVLPLLVLLLLAPARQAAAQRCPQACICDNSRRHVACRYQNLTEVPDAIPELTQRLDLQGNLLKVIPAAAFQGVPHLTHLDLRHCEVELVAEGAFRGLGRLLLLNLASNHLRELPQEALDGLGSLRRLELEGNALEELRPGTFGALGALATLNLAHNALVYLPAMAFQGLLRVRWLRLSHNALSVLAPEALAGLPALRRLSLHHNELQALPGPVLSQARGLARLELGHNPLTYAGEEDGLALPGLRELLLDGGALQALGPRAFAHCPRLHTLDLRGNQLDTLPPLQGPGQLRRLRLQGNPLWCGCQARPLLEWLARARVRSDGACQGPRRLRGEALDALRPWDLRCPGDAAQEEEELEERAVAGPRAPPRGPPRGPGEERAVAPCPRACVCVPESRHSSCEGCGLQAVPRGFPSDTQLLDLRRNHFPSVPRAAFPGLGHLVSLHLQHCGIAELEAGALAGLGRLIYLYLSDNQLAGLSAAALEGAPRLGYLYLERNRFLQVPGAALRALPSLFSLHLQDNAVDRLAPGDLGRTRALRWGLHLSGNRITEVSLGALGPARELEKLHLDRNQLREVPTGALEGLPALLELQLSGNPLRALRDGAFQPVGRSLQHLFLNSSGLEQVGTGHLAGLVQEAAQGHRQRAFTQQAFASPLVPGLGPGLQSLHLQKNQLRALPALPSLSQLELIDLSSNPFHCDCQLLPLHRWLTGLNLRVGATCATPPNARGQRVKAAAAVFEDCPGWAARKAKRTPASRPSARRTPIQRKTVWTR

SEQ ID NO: 10982 - protein, 177 aa, Homo sapiens
  misc_feature (1)...(177): Xaa = X or * as defined in Table 2
ETPSSEPMEEEEDDDLELFGGYDSFRSYNSSVGSESSSYLEESSEAENEDREAGELHDLPAAFAQPWDSSLLGWQWFXASCLLRCVVSWVQGKPSSPRPRGSAASPAPGATPPTPRKPVSWLGYRENHRPKKPKSCTRLPGLPKLEPSSTLKGQDSWQMGHQQDKTLWSWASTGGSS

SEQ ID NO: 10983 - protein, 471 aa, Homo sapiens
  DOMAIN (313)..(333): ENDOPEPTIDASE LA (LON) SERINE PROTEASE (S16) SIGNATURE domain identified by eMATRIX, accession number PR00830A, p-value=5.109e- 15, raw score of 8.41
  DOMAIN (313)..(468): ATPases associated with various cellular act domain identified by PFam, accession name AAA, E-value=2e-37, PFam score of 137.7
  misc_feature (1)...(471): Xaa = X or * as defined in Table 2
KKMNLAEICDNAKKGREYALLGNYDSSMVYYQGVMQQDSRDIAQSVQRSQLSKGKWPTRFGQELLEEYEQVKSIVKHFKKVFKIDKPSQISPVSLSRXTHLEIPAVWPTPVPAEHRAPPQIRRRQSRSKTSEERNGRSRSPGTCRPSTSYIKEXNSLLQVGTRTIEPEGGDDKGRKNMQDGASDGEMPKFDGAGYDKDLVEALERDIVSRNPSIHWDDIADLEEAKKLLREAGVLPMWMPDFFKGIRRPWKNDSQNLGKPYSRAQDDIGMNIVGPLTHGFSSASAAPETTRQPLLFLLLLSLSKVKTFKGVLMVGPPGTGKTMLAKAVATECGTTFFNVSSSTLTSKYRGESEKLVRLLFEMARFYSPTTIFIDEIDSICSRRGTSDEHEASRRVKSELLIQMDGVGGALENDDPSKMVMVLAATNFPWDIDEALRRRCFIWVGDFPDVPQEKDTSVSPESCLLTDWWWGL

SEQ ID NO: 10984 - protein, 154 aa, Homo sapiens
NKYTDYCQLLKKSKGVDKKGKTASSLPEGSQSISREHLPAQSWLPWACLLLWLPALLHDEMQMRKQLPGLRSRAHSARQVRWPCREAAAGCRMRQASHLKSPEGKFHGHFLNTRVGRAGGNPHRPGKKWLLPSSVYVCNTEHCLWGAWCPKPNG

SEQ ID NO: 10985 - protein, 87 aa, Homo sapiens
ECDLEGIMPNVTISLSLPTNGSPLQDILVHPCVTSLDSAILTSSSIDAMDDSAFSGPYKFPFTPPLESFNLCFYTSQVPVPPILGFY

SEQ ID NO: 10986 - protein, 220 aa, Homo sapiens
IIPILASVTQPQKQPAWKTGTYKGKPQVSISITEKVKSMQYDKQGIADTWQVVGTVTCKCDLEGIMPNVTISLSLPTNGSPLQDILVHPCVTSLDSAILTSSSIDAMDDSAFSGPYKFPFTPPLESFNLCFYTSQSVIDDQPSKLLLNDGIGELMGFNWSNRSCGQVGSNQYAYCMPYAADQRTWRRGAWTSKYRNKNALYTFVKRFSHLRKQREKNPYP

SEQ ID NO: 10987 - protein, 61 aa, Homo sapiens
  misc_feature (1)...(61): Xaa = X or * as defined in Table 2
MDESAFPLCRTLGRVDSDDPGLIPGCASGPLAVPESEQKVHERKSLHWDLGTLVSLVRAQX

SEQ ID NO: 10988 - protein, 83 aa, Homo sapiens
CYPKVGRKPIKGEGEAPGAREKKNFAAEKRGLIPHGRKCLPISPCTGTRGPWCPCSSSGCASADTCTPRGALGAQKPIRESNF

SEQ ID NO: 10989 - protein, 87 aa, Homo sapiens; identical to SEQ ID NO: 9793
  misc_feature (1)...(87): Xaa = X or * as defined in Table 2

SEQ ID NO: 10990 - protein, 314 aa, Homo sapiens; identical to SEQ ID NO: 9794
  DOMAIN (119)..(136): PROTEIN TRANSMEMBRANE MG064 ATP-B domain identified by eMATRIX, accession number PD02980A, p-value=7.632e-10, raw score of 16.13

SEQ ID NO: 10991 - protein, 171 aa, Homo sapiens
  misc_feature (1)...(171): Xaa = X or * as defined in Table 2
KARDKSPFLGDLCLKDTGQQSLLQCRFFPFLGTKISCFQNVHSWQTITSDGLSAGDGGFGPKYQRSRGQIPSGLNSLPLNSSESDLLPTPHFPLQSQGLGSQVAQIDDVKAPPPFPAEPQPKRLRSPPRPLLGAIESVAVSRSLPSGPTGTDALXWLSVQKPPTRTIHGNE

SEQ ID NO: 10992 - protein, 155 aa, Homo sapiens
  misc_feature (1)...(155): Xaa = X or * as defined in Table 2
AMVGGGGVGGGLLENANPLIYQRSGERPVTAGEEDEQVPDSIDAREIFDIRRCWARAGSGGLRWGEQXYRAAGGAASQQGVPGRGFXVGKGAESLFLHFPQLIRFLNDPEHSLTLEELNVVEQVRVQVSDPESTVAVAFTPTISHWSMGTLIGVC

SEQ ID NO: 10993 - protein, 197 aa, Homo sapiens
  DOMAIN (6)..(23): PROTEIN TRANSMEMBRANE MG064 ATP-B domain identified by eMATRIX, accession number PD02980A, p-value=7.632e-10, raw score of 16.13
ARSHRISGGGSAMVGGGGVGGGLLENANPLIYQRFGERPVTAGEEDEQVPDSIDAREVFDLIRSHQMTPEHPLTLEELNVVEQVRVQVSDPESTVAVGFPKPTHSGTCRHGPPLIGLSIKVKLLRSLPSAFSRWDVAHLLPGDPLPQEHAVEQATLQIKEAGWATALGRTHHLLEVVNQCLSSPAPGTWAFVPLSLA

SEQ ID NO: 10994 - protein, 44 aa, Homo sapiens
DICYFQLTRLEQHDTTNVADQHDVLCRWLGTEEARALRRNKHRR

SEQ ID NO: 10995 - protein, 279 aa, Homo sapiens
QGANMPRYAQLVMGPAGIVKSTYCATMVQHCEALNRSVQVVNLDPAAQHFNYSVMADIRELIEVDDVMEDDSLRFGPNGGLVFCMEYFANNFDWLENCLGHVEDDYILFDCPGQIGVVTLTWPVMKQLVPALEQWEFRVCGVFLVDSQFMVDHSRFISGHLAALSAMISLEIPQVNIMTKMDLLSKKAKKEIEKFLDPDMYSLLEDSTSDLRKAKNSRKLDLKAIMWDLIGWTYSLVRIFIPYDQSDEESMNIVLQHIGFAIQYGEDLEFKRNPKEREE

SEQ ID NO: 10996 - protein, 438 aa, Homo sapiens
  DOMAIN (255)..(310): Copper type II ascorbate-dependent monooxygenases proteins. domain identified by eMATRIX, accession number BL00084D, p-value= 3.700e-20, raw score of 25.11
MDYGLLCGQQLVPQVEPVIQRGHESLVHHILLYQCSNNFNDSVLESGHECYHPNMPDAFLTCETVIFAWAIGGEGFSYPPHVGLSLGTPLDPHYVLLEVHYDNPTYEEVLDAEKYKYKVLASDEGLLTGHNMAVGFTWWKGLIDNSGLRLFYTMDIRKYDAGVIEAGLWVSLFHTIPPGMPEFQSEGHCTLECLEEALEAEKPSGIHVFAVLLHAHLAGRGIRLRHFRKGKEMKLLAYDDDFDFNFQEFQYLKEEQTILPGDNLITECRYNTKDRAEMTWGGLSTRSEMCLSYLLYYPRINLTRCASIPDIMEQLQFIGVKEIYRPVTTWPFIIKSPKQYKNLSFMDAMNKFKWTKKEGLSFNKLVLSLPVNVRCSKTDNAEWSIQGMTALPPDIERPYKAEPLVCGTSSSSSLHRDFSINLLVCLLLLSCTLSTKSL

SEQ ID NO: 10997 - protein, 131 aa, Homo sapiens
GEEPRGRASSVAGWVGAFRAPFIEAAVAGLGAGSGKRRRGWKMPVHSRGDKKETNHHDEMEVDYAENEGSSSEDEDTESSSVSEDGDSSEMDDEDCERRRMECLDEMSNLEKQFTDLKDQAKSCCYMIQSR

SEQ ID NO: 10998 - protein, 50 aa, Homo sapiens
SEKLLLYDTVQSELEEKIRRLEEDRHSIDITSVYMLQDLDILEDWTTIRK

SEQ ID NO: 10999 - protein, 67 aa, Homo sapiens
SLPNLDNAAICLYPAPPPEHDNHFEMDDEDCERRRMECLDEMSNLEKQFTDLKDHAGLFSSLPGCHH

SEQ ID NO: 11000 - protein, 80 aa, Homo sapiens
  DOMAIN (60)..(71): 5-HYDROXYTRYPTAMINE 1D RECEPTOR SIGNATURE domain identified by eMATRIX, accession number PR00514E, p-value=1.000e-08, raw score of 6.62
  misc_feature (1)...(80): Xaa = X or * as defined in Table 2
SNSPAXPSGEPGTMGCRPPCPVNFGILRKNGVPPCGPGGPKSPDLRTHPLGPPKGRGIPGGTHCPGPPLGFKKPWPPGRV

SEQ ID NO: 11001 - protein, 142 aa, Homo sapiens
GLPGSTTASAAAASAASASSDAPSFQLGKPRLQQTSFYGRFRHFLDIIDPRTLFVTERRLKEAVQLLEDYKHGTLRPGVTNEQLWSAQKIKSGYIPFGTPIVVGLLLPNQTLASTVFWQWLNHSHNACVNYANRNATKPSPA

SEQ ID NO: 11002 - protein, 448 aa, Homo sapiens
MAAGQRRSSLSRLGSQFINCDPECQLSCLVGLEVQKEEVIRAAEGWKRAAPAGLRPTNYNSRQASEGRVVIAGNQSYQSRASPRPLARWKASANGRAPIAEPAAAVAGLGAGSGKRRRGWKMPVHSRGDKKETNHHDEMEVDYAENEGSSSEDEDTESSSVSEDGDSSEMDDEDCERRRMECLDEMSNLEKQFTDLKDQLYKERLSQVDAKLQEVIVERAPEHLEPAGNLQENMQIRTKVAGIYRELCLESVKNKYECEIQASRQHCESEKLLLYDTVQSELEEKIRRLEEDRHSIDITSELWNDELQSRKKRKDPFWPDKKKPGVVSGPYIVYMLQDLDILEDWTTIKNAMATLGPHRVKTDPPVKLEKHLHSAISEEGRLYYDGEWYIRGQTICIDKKDECPTSAVITTINHDEVWFKRPDGSKSKLYISQLQKGKYSIITFIIMI

SEQ ID NO: 11003 - protein, 115 aa, Homo sapiens
  DOMAIN (60)..(85): Mitochondrial energy transfer proteins domain identified by eMATRIX, accession number BL00215A, p-value=1.000e-12, raw score of 15.82
  DOMAIN (54)..(115): Mitochondrial carrier proteins domain identified by PFam, accession name mito_carr, E-value=1.2e-08, PFam score of 32.6
QRGRVISPLTRTGGAGSKTGRLEEQLLASMQSRERHGMSKEFLQEHFNPQRRYNPSSHVLSGACAGAVAAAATTPLDVCKTLLNTQESLALNSHITGHITGMASAFRTVYQVGGV

SEQ ID NO: 11004 - protein, 91 aa, Homo sapiens
  DOMAIN (23)..(83): Mitochondrial carrier proteins domain identified by PFam, accession name mito_carr, E-value=7e-11, PFam score of 40.2
IWILSITGWLLSPFPSSLMALLVVKQRMQMYNSPYHRVTDCVRAVWQNEGAGAFYRSYTTQLTMNVPFQAIHFMTYEFLQEHFNPQRRYNP

SEQ ID NO: 11005 - protein, 311 aa, Homo sapiens
  DOMAIN (134)..(159): Mitochondrial energy transfer proteins domain identified by eMATRIX, accession number BL00215A, p-value=6.786e-12, raw score of 15.82
  DOMAIN (32)..(228): Mitochondrial carrier proteins domain identified by PFam, accession name mito_carr, E-value=4.4e-12, PFam score of 44.3
LLTLTFPRCSVAQPLPFTGGTSVSWSALLALHVAVVFLFAGAAGCVATLLHDAAMNPAEVVKQRMQMYNSPYHRVTDCVRAVWQNEGAGAFYRSYPTQLDHDVPFQAIHFMDLWNSCRSTLTPKRSYNPDSHFFSGLCAGAVAAAATTPLDVCKTLLNTPGVLGFELTHYRTYQGMASAFRTVYQVGGVTAYFRGVQARVIYQIPSTAIAWSVYEFFKYLIHLKGQEEWRAGKVKLALNESPGVQDDTDASWSHSLSPGMLPPQVELKGKEKGLSPTDFGVLTNTSSCQPLLPPPFLPGPKHVQQSTPQHL

SEQ ID NO: 11006 - protein, 593 aa, Homo sapiens
  DOMAIN (504)..(517): EF-hand calcium-binding domain proteins domain identified by eMATRIX, accession number BL00018, p-value=3.400e-12, raw score of 7.41
  DOMAIN (386)..(532): EF hand domain identified by PFam, accession name efhand, E- value=1.5e-16, PFam score of 68.4
MLQQGAILEAETKPSPDTKYTSALIFNFPASTADLGKTKRPAVEEKETPNKTRAQSLFLLAKERRQDPFRPGLSALPLVKMAAIGGAAHSEGRRLPCRPRPFTRSPPRPSRLDALQVQRDQSDGAALFGQPLQGRAGLSERPCQTERGKKPQQRQLSNRLQTAFRRGPLGSGFQLRWSCRGCGVNAARSPPGSAQRSRSREPLLGPRWPGSRGWIQLCESLKKIAKGWVSQDPSPRQLKECGQSASTSPRTPYSQDLLQHPKLEVAAADPRTRGTREPAALVERLEMLSGAGSVVDAVPLLVVRRRRRRRRRHSAQRALAAAAAAAASEPLDCQMRLCASLGVFSTAPSSSACRADITDCVSGLAGGEMVPRRVLADQLTEEQIAEFKEAFSLFDKDGDGTITTKELGTVMRSLGQTQTEGELQDMINEVYADGNGTIDFPVFLTMMARKMKDTDSEEEIRESFRVFAKDGNGYISAAELRHVMTNLGEKTTDLEVDEMIREADIDGDGQVNYEEFVQMMTGKMEDLTFQLPFSPPLEESNWNLLLTLLQKKEKKKKVHLFHSCFLYSKTECQKYLLVHTHQNLHVLVGGPVP

SEQ ID NO: 11007 - protein, 117 aa, Homo sapiens
  misc_feature (1)...(117): Xaa = X or * as defined in Table 2
GPPRPPTPPLLKPIRGATARPPRSRFXPRSDIPPLSRVLVARPPRSPPLGKPLWIMGRPRPPIAPLARAPMGRPNRAWMLLLPRRCFKLFEGNRRQCSSRGCHHGSGRRAGDRPNLS

SEQ ID NO: 11008 - protein, 113 aa, Homo sapiens
  misc_feature (1)...(113): Xaa = X or * as defined in Table 2
SCRCRRKAGKGRPGEQTDRPTRQPTSNNELSSHTTAYASNQPPIXLTRAPPPSTQVRPVPGPPAGAVVAVPGGALASVSFDSRDSKTAAQSSSEVGALPPHQDVTICAVRAAT

SEQ ID NO: 11009 - protein, 128 aa, Homo sapiens
  DOMAIN (68)..(92): ZEIN domain identified by eMATRIX, accession number DM00668C, p-value=8.794e-09, raw score of 8.89
RPLQTKGRKGQAGFGRSPARLPEPWWQPREEHWASVSFDSRDSKMAAQSAPKVVLKSTTKMSLNERFTNMLKNKQPTPVNIRASMQQQQQLASARNRRLAQQMENRPSVQAALKLKQKSLKQRLGKSN

SEQ ID NO: 11010 - protein, 147 aa, Homo sapiens
  misc_feature (1)...(147): Xaa = X or * as defined in Table 2
GRDVTPRSKPAPRWTSRSSPNGLKKRWCSRSWRSWERGPRAXSSALGKSNIQARLWPTHRGPGQGSNRRTRPTPYSREALPREGLRGGRATENPTXGRDVTPRSKPAPRWTSRSSPNGLKKRWCSRSWRSWERGPRAWSYGSWRNRW

SEQ ID NO: 11011 - protein, 86 aa, Homo sapiens
ADGSADLDSQRSSNELSSHTTAYASNQPLHLANPSPSTSQLRFRPVPAVAVPGAVGGSPREEHLASVSFDSRDSKMAAQVSSEKLC

SEQ ID NO: 11012 - protein, 97 aa, Homo sapiens
ASASSDAPPFQLGKPRFQQTSFYGRFRHFLDIIDPRTLFVTEEEGCLCSKNALNKASEEEVALLDRGEEWCILILNGERRGKEEEEKNSGKESMILR

SEQ ID NO: 11013 - protein, 140 aa, Homo sapiens
KLCTMVAPKLRSWMYAVYGALAVMGTMGPWYLLLLLGHCVGLYVASLLGQPWLCLGLGLASLASFKMDPLISWQVSQVEPVRREGELWHIRAQAGLSVVAIMAVDIFFHFFYILTIPSDLKFANRLPDSALAGLAYSNLV

SEQ ID NO: 11014 - protein, 145 aa, Homo sapiens
HPSCLARGILEDPGLTKYPASVCYHAGRLGTSRSVTSLGHTLVECALTRPSLPSPHRTSPKVEESNSKLLESERKLQEERHRTVVLEQHLEKIRLEPGKASSSQRAAPMTKTAPLLDVCCVRGLGCDGHNGPLVPAAAAWSLCGP

SEQ ID NO: 11015 - protein, 80 aa, Homo sapiens
PAQVQLLPAMNFWAIIMYNLVSLNSLKFTELVARRLLLTGFPQTTLSILFVTYCGVQLVKERERTLALEEEQKQDKEKPE

SEQ ID NO: 11016 - protein, 111 aa, Homo sapiens
  misc_feature (1)...(111): Xaa = X or * as defined in Table 2
SNEGVKGLSRQKAWTADYNFCLGGNCHFSGFYFDSDSCYSSYRRCRTCCDFCNSGRNCSGFWFGLCCTILCSDFXSSFLISRSTWTPGLAIIIPTRRLLITXTLLISWSTV

SEQ ID NO: 11017 - protein, 23 aa, Homo sapiens
LVKERERTLALEEEQKQDKEKPE

SEQ ID NO: 11018 - protein, 32 aa, Homo sapiens
TACFLSPLFRTFNFWPPLMFPPSASLMFKFTF

SEQ ID NO: 11019 - protein, 38 aa, Homo sapiens
  misc_feature (1)...(38): Xaa = X or * as defined in Table 2
HIYCEXSLYLFREXDLDDGDLDLECELARLRDLVYDLE

SEQ ID NO: 11020 - protein, 198 aa, Homo sapiens
  DOMAIN (84)..(127): 1 kw MIND INHIBITOR DIVISION CONTROL domain identified by eMATRIX, accession number DM01756B, p-value=4.822e-15, raw score of 22.91
  DOMAIN (49)..(163): ParA family ATPase domain identified by PFam, accession name ParA, E-value=2.7e-28, PFam score of 107.5
MYHGWVPDLHIHAEDTLLPFYLGEKDDVTYAIKPTCWPGLDIIPSCLALHRIETELMGKFDEGKLPTDPHLMLRLAIETVAHDYDVIVIDSAPNLGIGTINVVCAADVLIVPTPAELFDYTSALQFFDMLRDLLKNVDLKGFEPDVRILLTKYSNSNGSQSPWMEEQIRDAWGSMVLKNVVRETDEVGKDLHALLVRL

SEQ ID NO: 11021 - protein, 74 aa, Homo sapiens
  misc_feature (1)...(74): Xaa = X or * as defined in Table 2
LSVLFCCFGVESNFNFYVYSCCVFMATSQTDFICMHTYSLIEMIVIHYNLEFFXISKMATIAVLGFLRLDIYHV

SEQ ID NO: 11022 - protein, 443 aa, Homo sapiens
CGSPPFATSSFFALSGHVLFAKLCTMVAPKLRSWMYAVYGALAVMGTMGPWYLLLLLGHCVGLYVASLLGQPWLCLGLGLASLASFKMDPLISWQSGFVTGTFDLQEVLFHGGSSFTVLRCTSFALESCAHPDRHYSLADLLKYNFYLPFFFFGPIMTFDRFHAQVSQVEPVRREGELWHIRAQAGLSVVAIMAVDIFFHFFYILTIPSDLKFANRLPDSALAGLAYSNLVYDWVKAAVLFGVVNTVACLDHLDPPQPPKCITALYVFAETHFDRGINDWLCKYVYNHIGGEHSAVIPELAATVATFAITTLWLGPCDIVYLWSFLNCFGPQTLKLWVPKTGQKWGPPKHEIEGLLCQVQMSRRVRALFGAHELSWPIIMYNLVSLNSLKFTELVARRLLLTGFPQTTLSILFVTYCGVQLVKERERTLALEEEQKQDKKKPE

SEQ ID NO: 11023 - protein, 295 aa, Homo sapiens
RRLREAVQLLEDYKHGTLRPGVTNEQLWSAQKIKQAILHPDTNEKIFMPFRMSGICQGCLLVATSDAQQGKQEGMRPLSQGSELTRCHVLPRAVSQSKLDDQAEPKSEEINSFCDEAVARRIIKGTLWCHGQCPGQQLSGKCSECYWAVSYDVPGGPSTVRGVVGLLLPNQTLASTVFWQPSPASKFIQGYLGAVISAVSIAVGLNVLVQKANKFTPATRLLIQRFVPFPAVGPLDTDMQQLARETSVDPDMRKGLQELKAKGKLVDCKVSAQKLLSLLEKDEFKSGAHVDFYDK

SEQ ID NO: 11024 - protein, 88 aa, Homo sapiens
  DOMAIN (20)..(63): 'Homeobox' domain proteins domain identified by eMATRIX, accession number BL00027, p-value=3.700e-23, raw score of 26.43
  DOMAIN (12)..(62): Homeobox domain identified by PFam, accession name homeobox, E-value=1.5e-05, PFam score of 28.4
TIWDGEETVYCFKERSRAALKACYRGNRYPTPDEKRRLATLTGLSLTQVSNWFKNRRQRDRTGAGGGAPCKRKLPPGQPCVWQPHRDG

SEQ ID NO: 11025 - protein, 739 aa, Homo sapiens
  DOMAIN (216)..(259): 'Homeobox' domain proteins domain identified by eMATRIX, accession number BL00027, p-value=3.700e-23, raw score of 26.43
  DOMAIN (209)..(259): Homeobox domain identified by PFam, accession name homeobox, E-value=1.5e-05, PFam score of 28.4
MATLPAEPSAGPAAGGEAVAAAAATEEEEEEARQLLQTLQAAEGEAAAAAGAGAGAAAAGAEGPGSPGVPGSPPEAASEPPTGLRFSPEQVACVCEALLQAGHAGRLSRFLGALPPAERLRGSDPVLRARALVAFQRGEYAELYRLLESRPFPAAHHAFLQDLYLRARYHEAERARGRALGAVDKYRLRKKFPLPKTIWDGEETVYCFKERSRAALKACYRGNRYPTPDEKRRLATLTGLSLTQVSNWFKNRRQRDRTGAGGGAPCKSESDGNPTTEDESSRSPEDLERGAAPVSAEAAAQGSIFLAGTGPPAPCPASSSILVNGSFLAASGSPAVLLNGGPVIINGLALGEASSLGPLLLTGGGGAPPPQPSPQGASETKTSLVLDPQTGEVRLEEAQSEAPETKGAQVAAPGPALGEEVLGPLAQVVPGPPTAATFPLPPGPVPAVAAPQVVPLSPPPGYPTGLSPTSPLLNLPQVVPTSQVVTLPQAVGPLQLLAAGPGSPVKVAAAAGPANVHLINSGVGVTALQLPSATAPGNFLLANPVSGSPIVTGVALQQGKIILTATFPTSMLVSQVLPPAPGLALPLKPETAISVPEGGLPVAPSPALPEAHALGTLSAQQPPPAAATTSSTSLPFSPDSPGLLPNFPAPPPEGLMLSPAAVPVWSAGLELSAGTEGLLEAEKGLGTQAPHTVLRLPDPDPEGLLLGATAGGEVDEGLEAEAKVLTQLQSVPVEEPLEL

SEQ ID NO: 11026 - protein, 98 aa, Homo sapiens
  misc_feature (1)...(98): Xaa = X or * as defined in Table 2
VSDTLWALAGLAAGRWAGGCQTLGLQGVVQGLGLLINGPRAGAAPLSLGNLHPPSAARWHPSXAASHTGTGQSLVGIVEPHNPTSSGGXRPGTAGRSQ

SEQ ID NO: 11027 - protein, 173 aa, Homo sapiens
RGWVMWVDEFQPALVLSPYERQLNLDASVQHLEDGDGKRKRSSSSPRSINKKAKALDNSLQPKSLAASSPPPCSQPSQCPEEKPQGVKPHEGPRGPLSASGVPGPQPWPGQGGWWGAAGRVAEPRTESREPVSGAGTSSRSPSPTGFRQPPHPSARPSPRAAPGQRGWAGDRR

SEQ ID NO: 11028 - protein, 978 aa, Homo sapiens
  DOMAIN (301)..(309): 5 kw INTRON COI ND4L ND5 domain identified by eMATRIX, accession number DM00396A, p-value=7.429e-09, raw score of 5.97
MALMFTGHLLFLALLMFAFSTFEESVSNYSEWAVFTDDIDQFKTQKVQDFRPNQKLKKSMLHPSLYFDAGEIQAMRQKSRASHLHLFRAIRSAVTVMLSNPTYYLPPPKHADFAAKWNEIYGNNLPPLALYCLLCPEDKVAFEFVLEYMDRMVGYKDWLVENAPGDEVPIGHSLTGFATAFDFLYNLLDNHRRQKYLEKIWVITEEMYEYSKVRSWGKQLLHNHQATNMIALLTGALVTGVDKGSKANIWKQAVVDVMEKTMFLLNHIVDGSLDEGVAYGSYTAKSVTQYVFLAQRHFNINNLDNNWLKMHFWFYYATLLPGFQRTVGIADSNYNWFYGPESQLVFLDKFILKNGAGNWLAQQIRKHRPKDGPMVPSTAQRWSTLHTEYIWYDPQLTPQPPADYGTAKIHTFPNWGVVTYGAGLPNTQTNTFVSFKSGKLGGRAVYDIVHFQPYSWIDGWRSFNPGHEHPDQNSFTFAPNGQVFVSEALYGPKLTHLNNVLVFAPSPSSQCNKPWEGQLGECAQWLKWTGEEVGDAAGEIITASQHGEMVFVSGEAVSAYSSAMRLKSVYRALLLLNSQTLLVVDHIERQEDSPINSVSAFFHNLDIDFKYIPYKFMNRYNGAMMDVWDAHYKMFWFDHHGNSPMASIQEAEQAAEFKKRWTQFVNVTFQMESTITRIAYVFYGPYINVSSCRFIDSSNPGLQISLNVNNTEHVVSIVTDYHNLKTRFNYLGFGGFASVADQGQITRFGLGTQAIVKPVRHDRIIFPFGFKFNIAVGLILCISLVILTFQWRFYLSFRKLMRWILILVIALWFIELLDVWSTCSQPICAKWTRTEAEGSKKSLSSEGHHMDLPDVVITSLPGSGAEILKQLFFNSSDFLYIRVPTAYIDIPETELEIDSFVDACEWKVSDIRSGHFRLLRGWLQSLVQDTKLHLQNIHLHEPNRGKLAQYFAMNKDKKRKFKRRESLPEQRSQMKRRL

SEQ ID NO: 11029 - protein, 170 aa, Homo sapiens
SSVVEFSRPRGGTSQSDISTLSTFPSSPDLEVSETAMEVDTPAEQFLQPSTSSTMSAQAHSTSSPTESPHSTPLLSSPDSEQRQSVEASGHHTHHQSDNNNEKLSPKPGTGEPVLSLHYSTEGTTTSTIKLNFTDEWSSIASSSRGIGSHCKSEGQEESFRPTEFSAPTR

SEQ ID NO: 11030 - protein, 133 aa, Homo sapiens
EGETAMEVDTPAEQFLQPSTSSTMSAQAHSTSSPTESPHSTPLLSSPDSEQRQSVEASGHHTHHQSDSPSSVVNKQLGSMSLDEQQDNNNEKLSPKPGTGEPVLSLHYSTEGTTTSTIKLNFTDEWSSIASSF

SEQ ID NO: 11031 - protein, 224 aa, Homo sapiens
  misc_feature (1)...(224): Xaa = X or * as defined in Table 2
SCPLSCTSAATGLWVKEGLRIVSSVLLGLSCPWGSPLEAELDLGEGRLWRTSFYGRFRHFLDIIDPRTLFVTERRLREAVQLLEDYKHGTLRPGVTNEQLXSAQKISQAIYHPDTNEKIFMPFRMSGYIPFGTPIVVGLLLPNQTLASTVFWQWLNQSHNACVNYANRNATKPSPASKFIQGYLGAVISAVSIAVGLNVLVQKANKFTPATRLLIQRFVPFPAV

SEQ ID NO: 11032 - protein, 598 aa, Homo sapiens
  DOMAIN (138)..(153): G-PROTEIN BETA WD-40 REPEAT SIGNATURE domain identified by eMATRIX, accession number PR00320C, p-value=1.720e-10, raw score of 13.01
  DOMAIN (22)..(154): WD domain, G-beta repeat domain identified by PFam, accession name WD40, E-value=0.051, PFam score of 20.1
NRRTRPGCGVVTCYRREFIQRLKLEAALNVHDGCVNTICWNDTGEYILSGSDDTKLVISNPYSRKVLTTIRSGHRANIFSAKFLPCTNDKQIVSCSGDGVIFYTNVEQDAETNRQCQFTCHYGTTYEIMTVPNDPYTFLSCGEDGTVRWFDTRIKTSCTKEDCKDDILINCRRAATSVAICPPIPYYLAVGCSDSSVRIYDRRMLGHKELQGNYAGRGTTGIGLPRFISLPHLNNKSCRVTSLCYSEDGQEILVSYSSDYIYLFDPKDDTARELKTPSAEERREELRQPPVKRLRLRGDWSDTGPRARPESERERDGEPESPMCPLMQRMSDMLSRWFEEASEVAQSNRGRGRSRPRGGTSQSDISTLPTVPSSPDLEVSETAMEVDTPAEQFLQPSTSSTMSAQAHSTSSPKESPHSYSFCYFLPDSDQRQSVEASGHHTHHQSEFLRGPEIALLRKRLQQLRLKKAEQQRQQELAAHTQQQPSTSDQSSHEGSSQDPHASDSPSSVVNKQLGSMSLDEQQDNNNEKLSPKPGTGEPVLSLHYSTEGTTTSTIKLNFTDEWSSIASSSRGIGSHCKSEGQEESFVPQSSVQPPEGDS

SEQ ID NO: 11033 - protein, 626 aa, Homo sapiens; identical to SEQ ID NO: 9042
  DOMAIN (489)..(511): Chromo domain proteins domain identified by eMATRIX, accession number BL00598, p-value=7.136e-21, raw score of 14.45
  DOMAIN (145)..(306): RNA recognition motif. domain identified by PFam, accession name rrm, E-value=8.1e-44, PFam score of 159.0

SEQ ID NO: 11034 - protein, 66 aa, Homo sapiens
  DOMAIN (24)..(59): Prion protein domain identified by eMATRIX, accession number BL00291A, p-value=9.793e-09, raw score of 4.49
RNYGGGNYGSGNYNDFGNYNQQPSNYGPMKSGNFGGSRNMGGPYGGGNYGPGGSGGSGGYGGRSRY

SEQ ID NO: 11035 - protein, 34 aa, Homo sapiens
SRQAWHEASNYGPMKSGNFGGIRNMGGPYGGGNL

SEQ ID NO: 11036 - protein, 105 aa, Homo sapiens
  misc_feature (1)...(105): Xaa = X or * as defined in Table 2
QWGLRFMNGVLSGGLSVQTASPPSASRRHFPSLGVGDGELSHGGRCPAGVKVGRGGGNSYSLSKARCFGGHGVSSASVSAGSRSSXARLRSFPSPSLTGTGFGGR

SEQ ID NO: 11037 - protein, 419 aa, Homo sapiens
  DOMAIN (328)..(348): kw ALLERGEN POLLEN CIM1 HOL-LI domain identified by eMATRIX, accession number DM01724, p-value=7.362e-13, raw score of 8.14
  DOMAIN (88)..(254): RNA recognition motif. domain identified by PFam, accession name rrm, E-value=7.8e-30, PFam score of 112.5
KSGGTALAAVAAAPGPVRRCSSQSCFSSSGSSHYSARTSPVRVRPRRSLSSRSAAGNRAEATESAMEKTLETVPLERKKREKEQFRKLFIGGLSFETTEESLRNYYEQWGKLTDCVVMRDLASKRSRGFCFVTFSIHGLEVDAAIASRPHSINGEVVEQKRAVAREESGKPGAHVTVKKLFVGGIKEDTEEHHLRDYFEEYGKIDTIEIITDRQSGKKRGFGFVTFDDHDPVDKIVLQKYHTINGHNAEVRKALSRQEMQEVQSSRSGRGGNFGFGDSRGGGGNFGPGPGSNFRGGSDGYGSGRGFGDGYNGYGGGPGGGNFGGSPGYGGGRGGYGGGGPGYGNQGGGYGGGYDNYGGGNYGSGNYNDFGNYNQQPSNYGPMKSGNFGGSRNMGGPYGGGNYGPGGSGGSGGYGGRSRY

SEQ ID NO: 11038 - protein, 409 aa, Homo sapiens
  DOMAIN (305)..(325): kw ALLERGEN POLLEN CIM1 HOL-LI domain identified by eMATRIX, accession number DM01724, p-value=7.362e-13, raw score of 8.14
  DOMAIN (66)..(229): RNA recognition motif. domain identified by PFam, accession name rrm, E-value=1.5e-38, PFam score of 141.5
QQRRVPCGGAPRRVVSRAAAVLTTAPGRVRFVFVRGDLSHLARLREIGLKRLSPRWREKKKQFRKLFIGGLSFETTEESLRNYYEQWGKLTDCVVMRDPASKRSRGFGFVTLSSMAEVDAAMAARPHSIDGRVVEPKRAVAREESGKPGAHVTVKKLLVGGIKEDTEEHHLRDYFEEYGKIDTIEIITDRQSGKKRGFGFVTFDDHDPVDKLDLRKYHTINGHNAEVRKALSRQEMQEVQSSRSGRGGNFGFGDSRGGGGNFGPGPGSNFRGGSDGYGSGRGFGDGYNGYGGGPGGGNFGGSPGYGGGRGGYGGGGPGYGNQGGGYGGGYDNYGGGNYGSGNYNDFGNYNQQGSSYGPMKSGNFGCWRNMGGPYGGGNYGPGGSGGSGGYGGRSPILKLLPICHGASLV

SEQ ID NO: 11039 - protein, 95 aa, Homo sapiens
  DOMAIN (49)..(71): WAP-type 'four-disulfide core' domain proteins domain identified by eMATRIX, accession number BL00317B, p-value=7.571e- 12, raw score of 14.58
  DOMAIN (41)..(73): WAP-type (Whey Acidic Protein) 'four-disulfi domain identified by PFam, accession name wap, E-value=0.015, PFam score of 11.5
GPGRWVVVDEVTMWLELEQYPVSFLKQPFEIGRHLDLPKGTYGICVNMCPGNKSCPRGKRCQSNGCGHVCKVVPETSKSQPLRCSQGKMTHWSSL

SEQ ID NO: 11040 - protein, 237 aa, Homo sapiens
  DOMAIN (20)..(201): Cadherin domain identified by PFam, accession name cadherin, E-value=1.6e-29, PFam score of 111.5
LCGGVIDVNDHAPEVTMSAFTSPIPENAPETVVALFSVSDLDSGENGKISCSIQEDLPFLLKSSVGNFYTLLTETPLDRESRAEYNVTITVTDLGTPRLTTHLNMTVLVSDNNSPALHIGSVSATDRDSGTNAQVTYSLLPPQDPHLPLTSLVSINADNGHLFALRSLDYEALQGFQFRVGASDHGSPALSSEALVRVVVLDANDDSPFVLYPLQNGSAPCTELVPRAAEPGYLVTK

SEQ ID NO: 11041 - protein, 173 aa, Homo sapiens
LLKATELGLFGVWAHNGEDNGEPPRSATATLHVLLVDGFSQPYLPLPEAAPAQAQAEADLLTVYLVVALASVSSLFLLSVLLFVAVRLCRRSRAASVGRCSVPEGPFPGHLVDVRGAETLSQSYQYEVCLTGGPGTSEFKFLKPVISDIQAQGPGRKGEENSTFRNSFGFNIQ

SEQ ID NO: 11042 - protein, 186 aa, Homo sapiens
  misc_feature (1)...(186): Xaa = X or * as defined in Table 2
HLVPLCPCNLSKAGRCTVQERLLVICCSRSWRWRNLMXRWLNYAPVSSGHRHXSSLARETSVDPDMRKGPAGAEGKGKAVGCKGVSQETAEAYWKRTSSSLEPTWTLLTNKPMFFGFRNLFAPTFRHTPEALWLPTPCHRGSPALHIEAFMPAALPSGTASCELPGHWPYQLSGVLCCAPWVIKEA

SEQ ID NO: 11043 - protein, 321 aa, Homo sapiens
  DOMAIN (135)..(153): Cadherins extracellular repeat proteins domain proteins domain identified by eMATRIX, accession number BL00232C, p-value= 2.579e-09, raw score of 10.65
  DOMAIN (165)..(256): Cadherin domain identified by PFam, accession name cadherin, E-value=1.9e-08, PFam score of 41.5
MGHHLMIDKLVALGGLYYAIQRHYATKCSVLKNDQILVIGLFMIQNVIYRKHFANPLSALFLQQGIELFAAIAEIHITTVAERNHAITQIRLEAQTIFDSLKEWHNAIRKSLDYEALQAFEFRVGATDRGFPALSSEALVRVLVLDANDNSPFVLYPLQNGSAPCTELVPRAAEPGYLVTKVVAVDGDSGQNAWLSYQLLKATEPGLFGVWAHNGEVRTARLLSERDVAKHRLVVLVKDNGEPPRSATATLQVLLVDGFSQPYLPLPRAAPAQAQADSLTVYLVVALASVSSLFLFSVLLFVAVRLCRRSRAAPVGRCSVL

SEQ ID NO: 11044 - protein, 925 aa, Homo sapiens
  DOMAIN (358)..(376): CADHERIN SIGNATURE domain identified by eMATRIX, accession number PR00205B, p-value=1.214e-13, raw score of 11.39
  DOMAIN (168)..(925): Cadherin domain identified by PFam, accession name cadherin, E-value=4.5e-86, PFam score of 299.4
RILSVDDFVELNVSSLVAVAEGIGYRDLDSNMKKLGRIHPNRQVLAFILMVFLSQVRLEPIRYSVLEETESGSFVAHLAKDLGLGIGELASRSARVLSDDDKQRLQLDRQTGDLLLREKLDREELCGPIEPCVLHLQVVLEMPVQFFQGELLIQDINDHSPIFPEREVLLKILENSQPGTLFPLLIAEDLDVGSNGLQKYTISPNSHFHILTRNHSEGKKYPDLVQDKPLDREEQPEFSLTLVALDGGSPPRSGTVMVRILIMDINDNAPEFVHTPYGVQVLENSPLDSPIVRVLARDIDAGNFGSVSYGLFQASDEIKQTFSINEVTGEILLKKKLDFEKIKSYHVEIEATDGGGLSGKGTVVIEVVDVNDNPPELIISSLTSSIPENAPETVVSIFRIRDRDSGENGKMICSIPDNLPFILKPTLKNFYTLVTERPLDRETSAEYNITIAVTDLGTPRLKTQQNITVQVSDVNDNAPAFTQTSYTLFVRENNSPALHIGSVSATDRDSGTNAQVTYSLLPPQDPHLPLASLVSINTDNGHLFALRSLDYEALQAFRVSALGATDRGSPALSSEALVRVLVLDTNDNLPFVLYPLQNGSAPCTELIPGRAAEPGYLVTKVVAVDGDSGQNAWLSYQLLKATEPGLFGVWAHNGEVRTARLLSERDAAKHRLVVLVKDNGEPPRSATATLHVLLVDGFSQPYLPLPEAAPAQAQAEADLLTVYLVVALASVSSLFLLSVLLFVAVRLCRRSRAASVGRCSVPEGPFPGHLVDVSGTGTLSQSYQYEVCLTGDSGTGEFKFLKPIIPNFLPQSTDLCGGVIDVNDHAPEVTMSAFTSPIPENAPETVVALFSVSDLDSGENGKISCSIQEDLPFLLKSSVGNFYTLLTETPLDRESRAEYNVTITVTDLGTPRLTTHLNMTVLVSD

SEQ ID NO: 11045 - protein, 106 aa, Homo sapiens
  misc_feature (1)...(106): Xaa = X or * as defined in Table 2
NRITPTSARINLSILVPSAINNGSMTEDINRTVISGTPRQNSIKMTDKIRTIGIWERRPGVVVLTTCLIMVXHLTSAIANRLNLLRKLGRMVIFSHRLKVSSMKSA

SEQ ID NO: 11046 - protein, 395 aa, Homo sapiens
  DOMAIN (295)..(320): 1-AMINOCYCLOPROPANE-1-CARBOXYLATE SYNTHASE SIGNATURE domain identified by eMATRIX, accession number PR00753E, p-value=7.716e- 11, raw score of 8.01
  DOMAIN (145)..(395): Aminotransferases class-I domain identified by PFam, accession name aminotran_1, E-value=0.012, PFam score of -137.6
NFVMCHGEPWLAGRTVVPVSTLSGPELALQKLGKTPLGRYLFTSSTLTRDFIEIGRDAGLWGRRSRLRLSGKPLLLTELFYRRHRCTKRKKICDCISANVWAVLKTVEAAGSDRPVQCLTITAVQRERDTQSLSVITAELEPVSSPHFIREAGQYGTGRSSKEREVQPVVQRSFSNWIRNNCGDICELSPTSGDHPPPSGPGLYSARKAIMQHYQARGMRDVTVEDIYIGNGVSELIVQAMQALLNSGDEMLVPAPDYPLWTAAVSLSSGKAVHYLCDESSDWFPDLDDIRAKITPRTRGIVIINPNNPTGAVYSKELLMEIVEIARQHNLIIFADEIYDKILYDDAEHHSIAPLAPDLLTITFNGLSKTYRVAGFRQGWMVHRFFTPRLTVQAI

SEQ ID NO: 11047 - protein, 655 aa, Homo sapiens
  DOMAIN (523)..(560): PHOSPHORYLASE KINASE ALPHA MUSCL domain identified by eMATRIX, accession number PD01841H, p-value=2.909e-33, raw score of 21.30
  DOMAIN (27)..(146): Bacterial regulatory helix-turn-helix protei domain identified by PFam, accession name HTH_1, E-value=1.1e-28, PFam score of 108.8
SPRKGGGKGKKANRVLLTGAPLDPIDLSQSAVSHSVKELENHTGVRLLDRTTREVVLTDAGQQLALRLERLLDELNSTLRDTGRMGQQLSGKVRVAASQTISAHLIPQCIAESHRRYPDIQFVLHDRPQQWVMESIRQGDVDFGIVIDPGPVGDLQCEAILSEPFFLLCHRDSALAVEDYVPWQALQGAKLVLQDYASGSRPLIDAALARNGIQANIVQEIGHPATLFPMVAAGIGISILPALALPLPEGSPLVVKRITPVVERQLMLVRRKNRSLSTAAEALWDVCNCAIQPFFTAITRCIGSVTVKLVLVPVGKSEFLAAQHKVVTCNPAGDIAVVASVIGLICITLSKERFEPPTAAGEIVADTVQEHIVVEIHAIRRTVGAIRMQVEIKSGVTQAYLQLGINEKLGLSGRPDRPIGCLGTSKIYRILGKTVVCYPIIFDLSDFYMSQDVFLLIDDIKNALQFIKQYWKMHGRPLFLVLIREDNIRGSRFNPILDMLAALKKGIIGGVKVHVDRLQGPLENDLVVHVALIAESQRLQVFLNTYGIQTQTPQQVEPIQIWPQQELVKVTLGAFGHEEEVISNPLSPRVIQNIIYYKCNTHDEREAVIQQELVIHIGWIISNNPELFSGMLKIRIGLQNECSLVIQVSTIIPAT

SEQ ID NO: 11048 - protein, 763 aa, Homo sapiens
  DOMAIN (22)..(56): Bacterial regulatory proteins lysR family proteins. domain identified by eMATRIX, accession number BL00044, p-value=4.150e-19, raw score of 19.03
  DOMAIN (8)..(151): Bacterial regulatory helix-turn-helix protei domain identified by PFam, accession name HTH_1, E-value=8.9e-40, PFam score of 145.6
RKQMNYSLKQLKVFVTVAQEKSFSRAGERIGLSQSAVSHSVKELENHTGVRLLDRTTRAVVLTDAGQPLALRLERLLDELNSTLRDTGRMGQQLSGKVRVAASQTISAHLIPQCIAESHRRYPNIQFVLHDRPQQWVMESIRQGDVDFGIVIDPGPVGDLQCEAILSEPFFLLCHRDSALAVEDYVPWQALQGAKLVLQDYASGSRPLIDAALARNGIQANIVQEIGHPATLFPMVAAGIGISILPALALPLPEGSPLVVKRITPVVERQLMLRVDLRFAQKFQIGDRKILRSGNNAVNVLPAATCGFPFPVCCWRFAYGCCSALLRIPPRLYSVFIIISLLYGFSRAHISSPGACWVFIHERFGQFMYGLYPHDQRWRINLALLIGLVSIAPMFWKILPHRGRYIAAWAVIYPLIVWWLMYGGFFALERVETRQWGGLTLTLIIASVGIAGALPWGILLALGRRSHMPIVRILSVIFIEFWRGVPLITVLFMSSVMLPLFMAEGTSIDKLIRALVGVILFQSAYVAEVVRGGLQALPKGQYEAAESLALGYWKTQGLVILPQALKLETVRQPQTLAMEEINCHHNYVQKEQHFGEEIYVTRKGAVSARAGQYGIIPGSMGAKSFIVRGLGNEESFCSCSHGAGRVMSRTKAKKLFSVEDQIRATAHVECRKDAEVIDEIPMAYKDIDAVMAAQSDLVEVIYTLRQVHSCRAGETGAVAPASDRGKGGDGNLRSNRGRRGAGVAASALPARHRARGRLPLCYR

SEQ ID NO: 11049 - protein, 109 aa, Homo sapiens
LRDRDFHRIVQISSFIELHAENLKNEDDVDTGLLGFWTLLIISLTAGFSCCSFSWTVTYFDSFEPGMFPPTPLSPARFKKLTGHSFHMGYSMAILNGIVAALTVAWCLM

SEQ ID NO: 11050 - protein, 37 aa, Homo sapiens
CSLLFAILLAFLLAIAYLIVKAFSGLQMAWHLKPYNA

SEQ ID NO: 11051 - protein, 52 aa, Homo sapiens
CSLLFAILLAFLLAIAYLIVKELHAENLKNEDDVDTGLLGIICISRKFSLML

SEQ ID NO: 11052 - protein, 206 aa, Homo sapiens
RPLPRIGCCGPGAGQVGEARSPRVSLCFAPCRLLRAGGGRALRRRGPGTPGPVARPSYSSFTQGDSWGEGEVDEEEGCDQVARDLRAEFIGMGQWSEPRKLSVLPPDRNGSPVLPDKRNGIFPSGRGQQEPSLRRWPFQVLSILCSLLFAILLAFLLAIAYLIVKELHAENLKNEDDVDTGLLGFWTLLIISLTAGILLLQLFLGQ

SEQ ID NO: 11053 - protein, 104 aa, Homo sapiens
  DOMAIN (13)..(41): !!!! PROTEIN ALU SUBFAMILY WARNING ENTRY NUCLEAR PHOSPHO domain identified by eMATRIX, accession number PD02454B, p-value= 6.857e-19, raw score of 11.61
  misc_feature (1)...(104): Xaa = X or * as defined in Table 2
SQHFGRPRWADHLRSGVXDQPGQHDETPSLLKIQKLAGYSGEHLXSQLLRRLRHENCLNPGSGGCSEPRLHHCTPAWVAEPDSVGGGVGGKEKNNTSNMLQTRP

SEQ ID NO: 11054 - protein, 49 aa, Homo sapiens
KQMKLRVMNSQEQCLPSGAEDIMSGGPTLEAAEFDDLIGKCLPDRPIAE

SEQ ID NO: 11055 - protein, 632 aa, Homo sapiens
MPFAPHLLSALEWAAGEETLLFGHHDKGPEARSTGADGLSEPEGISLKRVAVVEDFFDIIYSMHVESSAEPGKAPKHAGQKKTYRAIAETYAFLPREAVTRFLMSCTECQKRMHFNSNGLEPKGGFGTLRRPSTFGWYNYNAALRNGRQPVSWPTVPRHKAANVQVAQQRHKVCLYPGQWEMLGGFTGGSVARLTHEAKAKVAPADSSASSGTQVQGQGLHSEPVAHTVCQPRGLSICYAGFQSVAQPLGGPGDDTSFGAPSVSPYVKGYFRLEKEICVPEIMFLEEDGEQKALPASSPLGSYLSPVLCLPCEPSSSQHPSGAVFLVWQMELTLPAPVEPSAGWESPRERAQTWGFSFIHLFSKHIWDTYYVSGIVLDVGDTAVNRTELCPLGMYIPVGLELPVAQSGPPHCQVAGIPAHLGPGSELSERQVIWAKSGKGQVSGMEIKKEQLPPGTVIASPQELGIVGDLPHTPPSMPLLKDPSDTDRLKTQGLFLQKSGHLSKLQVFVCKMEPFRKRRAATSPKGKPSVLAPEENEPPSPLVSGIIDYNMPLTSTYLKQMKLRVMNSQEQSTAGEVYRELTIEKADDSHERSSIFWTLCVCCLQNLTAAHGLIPLSAPFTGEKTEPLTELS

SEQ ID NO: 11056 - protein, 91 aa, Homo sapiens
NEPPSPLVSGIIDYNMPLTSTYLKQMKLRVMNSQEQSTAGEVYRELTIEKADDSHERSSIFWTLCVCCLQNLTAAHGLIPLSAPFTGEKTE

SEQ ID NO: 11057 - protein, 131 aa, Homo sapiens
LSPAPAPLTRGSRPPISASLAAQDETSVSSEDFDMSDSTWMSADPHLASSLSPSQDERMRSPQNLHSQEDDDSSSESGSGNGSSTLNPSTSSSTQGDPAFPEMNGNGAVAPMDFTTAAEDQPINLCDKLPP

SEQ ID NO: 11058 - protein, 69 aa, Homo sapiens
SRPPISASLPAQDETSVSSEDFDMSDSTWMSADPHLASSLSPSQDERMRSPQNLHSQEDGGVCLQGPTA

SEQ ID NO: 11059 - protein, 949 aa, Homo sapiens
  DOMAIN (290)..(300): TYPE I ANTIFREEZE PROTEIN SIGNATURE domain identified by eMATRIX, accession number PR00308C, p-value=8.892e-10, raw score of 3.83
EMVPRWAIYQGFQDCLVHHASSRASGLWKLLNPCRGLRCPDTRLPTSRWPNRDTRSASTQLLGKQSLPPAPEADPVFLPQEENEPPSPLVSGIIDYNMPLTSTYLKQMKLRVMNSQEQAGSSPTPIQTERHTAQLLLTADQTLVLPATQHYVVLKKFPRPGAEDIMSGGPTLEAAEFDDLIGKCLPDRPIAGSVRLGDRIWNPRGSPPRRCRLHGQCVPGSGLERRPRDYPITLQLWLARRQDPARCGLAEHNDRRRGGGGHAGGGRWGSRRCLGRTVTRRGGASPSPRAAAAAAAAAAAGAVGLSPPPAPLTRGSRPPISASLPAQDETSVSSEDFDMSDSTWMSADPHLASSLSPSQDERMRSPQNLHSQEDGWAVGGLLSKSRVEPWLGQVMPTLPWAHPWVTAALSHQEAQNSGLLLPPPGPNTHGQTSALEQRAGAQAFQGLAVGHTGSPGSQESVHHQLGRRRHRQCWAVLGPGPPRESHGGGTASSSHTSGHGRQSARRACWPPVAVYLAYGPRDEPWPTAGATMEIGADDSSSESGSGNGSSTLNPSTSSSTQGDPAFPEMNGNGADGPHGLHQAAEDQPINLCDKLPPATALGTASYPSDGCGADGLRSRVKYGVKTTPESPPYSSGSYDSIKTEVSGCPEDLTVGRAPTADDDDDDHDDHEDNDKMNDSEGMDPERLKAFNVSTGRKQMFVRLFVDENLDRMVPISKQPKEKIQAIIESCSRQFPEFQERARKRIRTYLKSCRRMKKNGMEMTRPTPPHLTSAMAENILAAACESETRKAAKRMRLEIYQSSQDEPIALDKQHSRDSAAITHSTYSLPASSYSQDPVYANGGLNYSYRGYGALSSNLQPPASLQTGNHSNGPTDLSMKGGAFTTSTTPTPTPSSTSTSRPVPTAQLSPTEISAVRQLIAGYRESAAFLLRSADELENLILQQNRPRRHL

SEQ ID NO: 11060 - protein, 248 aa, Homo sapiens
ETHAPPSGVWGLERPSHPADQEIAGGQGQTAPAWEKPHSHPTPKSCGDQTKTTLHTERREDKPSFTRAGWGWENLKGPPVTEGAGSPGGSSHGAGLNRDHPLQSQPGRRAIPWPQRAPTHMLFSMTRGQSPGAAPGAQPEISKLAGYKKQKKQRSCLRKKCHPQEAGHRQRVAHSAGPGLQGEAAGEGRGEGAFWLKARNSKYSSLGINIPPNKGAQGSCLGKVGCRRHDPRHSGLSAPFPRPMSQAL

SEQ ID NO: 11061 - protein, 127 aa, Homo sapiens
VKRQLRRLRRSPWPDEKPKEGVKTENNDHINLKVAGQDGSVEQFKIKRHTPLSKLMKAYCERQGLSMKQIKIPDFDGQPINETDTPATVGKWKDERYQLMVFQQARPGGVYLKRELCFLYSQNSVSF

SEQ ID NO: 11062 - protein, 80 aa, Homo sapiens
HQKQVRMTTLTHRARRTEISKNSEKKMESEEDSNWEKSPDNEDSGDSKDIRLTLMEEVLLLGLKDKEVMQLGLLGYLKDY

SEQ ID NO: 11063 - protein, 109 aa, Homo sapiens
  misc_feature (1)...(109): Xaa = X or * as defined in Table 2
LLTPSSSAALKGESVQWHLREAGQSLPRRLTCAGWNKRFLHWIDQLSGXTQTCLLLVVFVWIATEXLGESLPLXAPIGGTQPWXFLIGAMKKHQETGENDHFNSPGPSH

SEQ ID NO: 11064 - protein, 300 aa, Homo sapiens
  DOMAIN (9)..(25): Ank repeat proteins domain identified by eMATRIX, accession number PF00023A, p-value=6.464e-09, raw score of 16.03
  DOMAIN (4)..(283): Ank repeat domain identified by PFam, accession name ank, E- value=6.3e-09, PFam score of 43.1
  misc_feature (1)...(300): Xaa = X or * as defined in Table 2
KTTRGYTLLHCAAAWGRLETLKALVELDVDIEALNFREERARDVAARYSQTECVEFLDWAGLNPGTATHDSDEEAAFLTRVWSTGHNDSGVKQRMGQKEIQNATSSNHFTCPSSTLQRKKGVXFVGLLWXFRNVSTLLMKTFLPQARNSPPETPSGTITTQITGKICRMYFWSYMESEGPPESERAEFFSQQEEENEEEEAQEPEETGPKNPLLQPALTGDVEGLQKIFEDPENPHHEQAMQLLLEEDIVGRNLLYAACMAGQSDVIRALAKYGVNLNEKTTRGDTLLHCAAAWGRLETL

SEQ ID NO: 11065 - protein, 272 aa, Homo sapiens
ARTLKRRWKVRKTVIGRKVQTMKILETLRISALLLWEEVLLLGLKDKEGYTSFWNDCISSGLRGGILIELAMRGRIYLEPRTMRKKRLLDRRVLLKSDSPTGDVYWDETLKHIKATEPTETVQTWIELLTGETWNPFKLQYQLRNVRERIAKNLVEKGILTTEKQNFLLFDMTTHPVTNTTEKQRLVKKLQDSVLERWVNDPQRMDKRTLALLVLAHSSDVLENVFSSLTDDKYDVAMNRAKDLVELDPEVEGTKPSATEMIWAVLAAFNKS

SEQ ID NO: 11066 - protein, 359 aa, Homo sapiens
MEPIGARLSLEAPGPAPFREAPPAEELPAPVVPCVQGGGDGGGASETPSPDAQLGDRPLSPKEECRPPGAGGAAGMPPPLPRALLFLARRPHLVRRPSSCSSSSNRRWHWAASGAEDAQLGPGGCCAKCKKRVQFADTLGLSLASVKHFSEAEEPQVPPAVLSRLRSFPMRAEDLEQLGGLLAAAAVAAPLSAPPSRLRPLFQLPGPSAAAERLQRQRVCLERVQCSTASGAEVKGSGRVLSCPGPRAVTVRYTFTEWRSFLDVPAELQPEPLEPQQPEAPSGASEPGSGDAKKEPGAECFHFSLCLPPGLQPEDEEDADERGVAVHFAVCYRCAQGEYWDNNAGANYTLRYARPADAL

SEQ ID NO: 11067 - protein, 127 aa, Homo sapiens
  DOMAIN (110)..(121): Neutral zinc metallopeptidases zinc-binding region proteins. domain identified by eMATRIX, accession number BL00142, p-value= 4.000e-09, raw score of 8.38
NGFCVQPPYFTGEITVLKMLFLSQDFLCVSSRGDLLYGGGSPEPWPRAVCHIHTVSGHCLLFLPFSAVNKDRHFSCEDCNGNVSGGFDASTSQIVLCQNNIHNQAHMNRVVTHELIHAFDHCRAHVD

SEQ ID NO: 11068 - protein, 296 aa, Homo sapiens
  DOMAIN (172)..(183): Neutral zinc metallopeptidases zinc-binding region proteins. domain identified by eMATRIX, accession number BL00142, p-value= 4.000e-09, raw score of 8.38
PPNVFSPASLPFFPAEGGPGRSRWREGGYLSQSRSGRLSQEEAASRSAGGMAGAPDERRRGPAAGEQLQQQHVSCQVFPERLAQGNPQQGFFSSFFTSNQKCQLRLLKTLETNPYVKLLLDAMKHSGCAVNKDRHFSCEDCNGNVSGGFDASTSQIVLCQNNIHNQAHMNRVVTHELIHAFDHCRAHVDWFTNIRHLACSEVRAANLSGDCSLVNEIFRVQFGLKHPPQTCVRDRATLSILAVRNISKEVAKKAVDEVFESCFNDHEPFGRIPHNKTYARYAHRDFENRGRYYSNI

SEQ ID NO: 11069 - protein, 61 aa, Homo sapiens
  misc_feature (1)...(61): Xaa = X or * as defined in Table 2
MTGQISNKKCIELENXXXXXXXXXXXXXXXXXXXXXXXXXXXXXXXXXXXXXXXXXXXXXX

SEQ ID NO: 11070 - protein, 107 aa, Homo sapiens
EFVFFFFETESFSVTQLECSGHNLGLHCNLHLPGSSNAPASASRVARITGAHHHARLIFVFLVEMGFHQTGWAMLVLKLPDIQVICPPWPPQSAGIYRHEPQHPGRK

SEQ ID NO: 11071 - protein, 47 aa, Homo sapiens
  misc_feature (1)...(47): Xaa = X or * as defined in Table 2
MVLSSFNFQKAIKLALLKYFKISFQLFPFYVHKIGCRHSHFAMNVSX

SEQ ID NO: 11072 - protein, 159 aa, Homo sapiens
  DOMAIN (124)..(135): NONHISTONE CHROMOSOMAL PROTEIN HMG17 FAMILY SIGNATURE domain identified by eMATRIX, accession number PR00925C, p-value=2.765e- 09, raw score of 5.57
  misc_feature (1)...(159): Xaa = X or * as defined in Table 2
SRSHDHLYTVYVPSPWNFFRALRISNSKNEMFSMSFLFREMKKKKLPSDSGDLEALEGKDKEKESTVHIETHQNTSKNVAAVQPMKRGQKSKMKKMKEKYXDQDEEDRELIMKLLGSAGSNKEEKGKKGKKGKTKDEPVKKQPQKPRGGQRVSDNIKKE

SEQ ID NO: 11073 - protein, 401 aa, Homo sapiens
  DOMAIN (222)..(233): NONHISTONE CHROMOSOMAL PROTEIN HMG17 FAMILY SIGNATURE domain identified by eMATRIX, accession number PR00925C, p-value=2.765e- 09, raw score of 5.57
SHTDFPYDNSTDGGDTSSDEDKEEHETPVEVELMTQVDQEDITLQSGRDELNEELIQEESSEDEGEYEEVREKDQDSVGEMKDEGEETLNYPDTTIDLSHLQPQRSIQKLASKEESSNSSDSKSQSRRHLSAKERREMKKKKLPSDSGDLEALEGKDKEKESTVHIETHQNTSKNVAAVQPMKRGQKSKMKKMKEKYKDQDEEDRELIMKLLGSAGSNKEEKGKKGKKGKTKDEPVKKQPQKPRGGQRVSDNIKKETPFLEVITHELQDFCAVDDPHLIDQGKEPDLDQQGNEENLFDSFDQGQPHPEDVLLGFAIPICAPYTTMTNYKYKVKLTPGVQKKGKAAKTALNSFMHSKEATAREKDLFRSVKDTDLSRNIPGKVKSVCTQSSERKKEIAEMKF

SEQ ID NO: 11074 - protein, 439 aa, Homo sapiens
  DOMAIN (286)..(304): E-CLASS P450 GROUP IV SIGNATURE domain identified by eMATRIX, accession number PR00465A, p-value=9.518e-12, raw score of 12.90
  DOMAIN (18)..(205): Mitochondrial carrier proteins domain identified by PFam, accession name mito_carr, E-value=1.3e-34, PFam score of 121.5
MSVPEEEERLLPLTQRWPRASKFLLSGCAATVAELATFPLDLTKTRLQMQGEAALARLGDGARESAPYRGMVRTALGIIEEEGFLKLWQGVTPAIYRHVVYSGGRMVTYEHLREVVFGKSEDEHYPLWKSVIGGMMAGVIGQFLANPTDLVKVQMQMEGKRKLEGKPLRFRGVHHAFAKILAEGGIRGLWAGWVPNIQRAALVNMGVTAFIHNRSHPSRNAHRLRLGEPVRQKPLVLLRDGHSAVAQDDNALLFAAALHRAAGHAIPARAAPFQPASGRRKNLRRPPCIKGWIPWIGVGFEFGKAPLEFIEKARIKMRSLEKLRSVTKVQQLFDQADLGIQAFTYCAASLWHCVWNLWVLGLTDFKNEATAPRGMKLQTFAVSVTALKATRLDLFVPPGGLVVSLASGVKLQTFSIPPPPPRDLNSSGLNSSDYIMSSR

SEQ ID NO: 11075 - protein, 83 aa, Homo sapiens
SLILFFYTFCQVRHFASKQDAPNSQPGSLASPAQTCGPSIPQSQGTGPAGGGFMFCFKQKTQPYFSLQKQKRKPKKIQPLNDK

SEQ ID NO: 11076 - protein, 104 aa, Homo sapiens
MSVPDEEERLLRLTQRWPRASKFLLSGCAATVAELGTRLPTPGPPGPVARAALGEETAGAASRPGSAQSKRSPPSHARLAEVAVEARPRGGRRRDLEVSTAFSF

SEQ ID NO: 11077 - protein, 482 aa, Homo sapiens
  DOMAIN (77)..(122): CARCINOEMBRYONIC ANTIGEN PRECURSOR AMINO-TERMINAL DOMAIN domain identified by eMATRIX, accession number DM00372B, p-value= 8.750e-37, raw score of 20.31
  DOMAIN (100)..(452): Immunoglobulin domain identified by PFam, accession name ig, E-value=1.2e-07, PFam score of 29.6
  misc_feature (1)...(482): Xaa = X or * as defined in Table 2
GAVRTWGRGFQTEKCQASLLNFWNPPTTAQVTIEAEPTKVSKGKDVLLLVHNLPQNLAGYIWYKGQMKDLYHYITSYVVDGQIIIYGPAYSGRETVYSNASLLIQNVTREDAGSYTLHIVKRGDGTRGETGHFTFTLYRHSLDSALSLEVTGSSQPLXDTWENCPTLWLHCLMTELTSGLDSVLPCVISAEVPSPRSGFPVSKGFKDNWKFHHPSLGCPWQGKLQRKHTSGGKVRLKLRRFQHCMLQVRTTSETPKPSISSSNLYPREDMEAVSLTCDPETPDASYLWWMNGQSLPMTHSLQLSKNKRTLFLFGVTKYTAGPYECEIRNPVSASRSDPVTLNLLPKLPKPYITINNLNPRENKDVLAFTCEPKSENYTYIWWLNGQSLPVSPRVKRPIENRILILPSVTRNETGPYQCEIQDRYGGIRSYPVTLNVLYTTKHSGLYACSVRNSATGMESSKSMTVKVSAPSGTGHLPGLNPL

SEQ ID NO: 11078 - protein, 336 aa, Homo sapiens
  DOMAIN (60)..(105): CARCINOEMBRYONIC ANTIGEN PRECURSOR AMINO-TERMINAL DOMAIN domain identified by eMATRIX, accession number DM00372A, p-value= 6.500e-39, raw score of 19.18
  DOMAIN (104)..(260): Immunoglobulin domain identified by PFam, accession name ig, E-value=0.0011, PFam score of 16.9
MATEKRLSAEGGRTAQLTAVLRKFLDPRLISTEENTQAAETMGPLSAPPCTEHIKWKGLLVTASLLNFWNLPTTAQVTIEAQPPKVSEGKDVLLLVHNLPQNLTGYIWYKGQIRDLYHYITSYVVDGQIIIYGPAYSGRETAYSNASLLIQNVTREDAGSYTLHIIKRGDGTRGVTGYFTFTLYLETPKPSISSSNLNPREAMETVILTCDPETPDTSYQWWMNGQSLPMTHRFQLSETNRTLFLFGVTKYTAGPYECEIRNSGSASRSDPVTLNLLREYLLFLCGPDCHPKYTWPEARPLSPSQVQVQRPLPLGIKAGHDFLPQANQNRPRLDPQ

SEQ ID NO: 11079 - protein, 456 aa, Homo sapiens
  DOMAIN (47)..(92): CARCINOEMBRYONIC ANTIGEN PRECURSOR AMINO-TERMINAL DOMAIN domain identified by eMATRIX, accession number DM00372A, p-value= 4.000e-39, raw score of 19.18
  DOMAIN (133)..(424): Immunoglobulin domain identified by PFam, accession name ig, E-value=1e-15, PFam score of 55.7
TAQLTAVLREFLDPRLISTEENTQAAETMGTLSAPPCTQRIKWKGLLLTASLLNFWNLPTTAQVTIEAEPTKVSEGKDVLLLVHNLPQNLTGYIWYKGQMRDLYHYITSYVVDGEIIIYGPAYSGRETAYSNASLLIQNVTREDAGSYTLHIIKGDDGTRGVTGRFTFTLHLETPKPSISSSNLNPRETMEAVSLTCDPETPDASYLWWMNGQSLPMTHSLKLSETNRTLFLLGVTKYTAGPYECEIRNPVSASRSDPVTLNLLPKLPKPYITINNLNPRENKDVLNFTCEPKSENYTYIWWLNGQSLPVSPRVKRPIENRILILPSVTRNETGPYQCEIRDRYGGIRSDPVTLNVLYGPDLPRIYPSFTYYRSGEVLYLSCSADSNPPAQYSWTINEKFQLPGQKLFIRHITTKHSGLYVCSVRNSATGKESSKSMTVEVSAYSSSINYTSGNRN

SEQ ID NO: 11080 - protein, 618 aa, Homo sapiens
  DOMAIN (60)..(105): CARCINOEMBRYONIC ANTIGEN PRECURSOR AMINO-TERMINAL DOMAIN domain identified by eMATRIX, accession number DM00372A, p-value= 6.500e-39, raw score of 19.18
  DOMAIN (104)..(558): Immunoglobulin domain identified by PFam, accession name ig, E-value=1.1e-17, PFam score of 62.1
MATEKRLSAEGGRTAQLTAVLRKFLDPRLISTEENTQAAETMGPLSAPPCTEHIKWKGLLVTASLLNFWNLPTTAQVTIEAQPPKVSEGKDVLLLVHNLPQNLTGYIWYKGQIRDLYHYITSYVVDGQIIIYGPAYSGRETAYSNASLLIQNVTREDAGSYTLHIIKRGDGTRGVTGYFTFTLYREAMETVILTCDPETPDTSYQWWMNGQSLPMTHRFQLSETNRTLFLFGVTKYTAGPYECEIRNSGSASRSDPVTLNLLQHSWLIDGKFQQSAQVFFIPQITKTYRGLYVCFIHNSATAGTNLIIKRTIVPALKNKRVQHGQYGIDRKLITKPETWENKDVLAFTCEPKSESYTYIWWLNGQSLPVSPRVKRPIENRILILPSVTRNETGPYECEIRDRYGGIHSDPVTLNVLCIFCSSVGQATSLNPNDQGPGLSVSLRSKYRQLYFWTSKLAMTPCPGKTWVGTALTKNIRGVDGLVVGDLGPTSCDGPDLPRIHPSYTNYRSGDNLYLSCFANSNPPAQYSWTINGKFQQSGQNLFIPQITTKHSGLYVCSVRNSATGEESSTSLTVKVSGCREMRREGASGQTPKPGPGSEVSGCMKLWAQYVGHSMEDCD

SEQ ID NO: 11081 - protein, 439 aa, Homo sapiens
  DOMAIN (41)..(86): CARCINOEMBRYONIC ANTIGEN PRECURSOR AMINO-TERMINAL DOMAIN domain identified by eMATRIX, accession number DM00372A, p-value= 1.000e-40, raw score of 19.18
  DOMAIN (127)..(418): Immunoglobulin domain identified by PFam, accession name ig, E-value=1e-15, PFam score of 55.7
VLREFLDPRLISTEENTQAAETMGTLSAPPCTQRIKWKGLLLTASLLNFWNLPTTAQVTIEAQPPKVSEGKDVLLLVHNLPQNLTGYIWYKGQMRDLYHYITSYVVDGEIIIYGPAYSGRETAYSNASLLIQNVTREDAGSYTLHIIKGDDGTRGVTGRFTFTLHLETPKPSISSSNLNPRETMEAVSLTCDPETPDASYLWWMNGQSLPMTHSLKLSETNRTLFLLGVTKYTAGPYECEIRNPVSASRSDPVTLNLLPKLPKPYITINNLNPRENKDVLNFTCEPKSENYTYIWWLNGQSLPVSPRVKRPIENRILILPSVTRNETGPYQCEIRDRYGGVRSDPVTLNVLYGPDLPRIYPSFTYYRSGEVLYLSCSADSNPPAQYSWTINEKFQLPGQKLFIRHITTKHSGLYVCSVRNSATGKESSKSMTVEVSEAL

SEQ ID NO: 11082 - protein, 749 aa, Homo sapiens
  DOMAIN (62)..(102): kw TRANSCRIPTASE REVERSE II ORF2 domain identified by eMATRIX, accession number DM01354Y, p-value=1.000e-40, raw score of 10.69
  DOMAIN (333)..(718): Immunoglobulin domain identified by PFam, accession name ig, E-value=3e-17, PFam score of 60.6
MAILPKVIYRFNAIPIKLPMTFFTELERTTLKFIWNQKRACIAKSILSQKNKAGGITLPDFKLYYKATVTKTAWYWYQNRDIDQWNRTDPSEITPHIYNYLIFDKPEKNKQWGKDSLFNKWCWENWLAICRKLKLDPFLTPYTKINSRWIKDLNVRPKTIKTLEENLGITIQDIGMGKDFMSKTPKAMATKAKIDKWDLIKLKSFCTAKETTIRVNRQPTKWEKIFTTYSSDKGLISRIYNELKQIYKKKTNNPIKKLISTEENTQTAETMGLLSAPPCTQRITWKGLLLTASLLNFWNPPTTAQVTIEAQPTKVSEGKDVLLLVHNLPQNLTGYIWYKGQIRDLYHYITSYVVDGQIIIYGPAYSGRETIYSNASLLIQNVTQEDAGSYTLHIIMGGDENRGVTGHFTFTLYLETPKPSISSSKLNPREAMEAVSLTCDPETPDASYLWWMNGQSLPMSHRLQLSETNRTLFLLGVTKYTAGPYECEIRNPVSASRSDPFTLNLLQHSWLIDGKFQQSAQVFFIPQITKTYRGVYVCFIHNSATAGTNLIIKRIIVPAKLPKPYITINNLKPRENKDVLNFTCEPKSENYTYIWWLNGQSLPVSPRVKRPIENRILILPSVTRNETGPYQCEIRDQYGGIRSYPVTLNVLYGPDLPRIYPSFTYYRSGEVLYLSCSADSNPPAQYSWTINGKFQLSGQKLFIPQITTKHSGLYACSVRNSATGKESSKSMTVKVSGGIALADTSFSCS

SEQ ID NO: 11083 - protein, 664 aa, Homo sapiens
  DOMAIN (82)..(127): CARCINOEMBRYONIC ANTIGEN PRECURSOR AMINO-TERMINAL DOMAIN domain identified by eMATRIX, accession number DM00372B, p-value= 8.750e-37, raw score of 20.31
  DOMAIN (105)..(646): Immunoglobulin domain identified by PFam, accession name ig, E-value=2.4e-16, PFam score of 57.7
MGPLSAPPCTQRITWKGLLLTALLLNFWNLPTTAQVTIEAEPTKVSKGKDVLLLVHNLPQNLAGYIWYKGQMKDLYHYITSYVVDGQIIIYGPAYSGRETVYSNASLLIQNVTREDAGSYTLHIVKRGDGTRGETGHFTFTLYLETPKPSISSSNLYPREDMEAVSLTCDPETPDASYLWWMNGQSLPMTHSLQLSKNKRTLFLFGVTKYTAGPYECEIRNPVSASRSDPVTLNLLQHSWLIDGKFQQSAQVFFIPQITKTYRGVYVCFIHNSATAGTNLIIKRIIVPDTLRKRGNHEKVESSDDIENSNQPFSHPKAFKNIQVQHGQYGIHRKLITKLEKWLDSGLPCVISAETSSPRPGCSVSSGFQGHGKSHYYSSLECPWKWKLQRNHIYGGKVGWNLEGAHQLHIPAKLPKPYITINNLNPRENKDVLAFTCEPKSENYTYIWWLNGQSLPVSPRVKRPIENRILILPSVTRNETGPYQCEIQDRYGGIRSYPVTLNVLCIFCSSVGQDTSLNPNDQGPGLSVSLRSKYRHLYFWTSEVAMTPCPGKTWVDTALTKNIRRGDALVMGDLGPTACDGPDLPRIFPSVTSYYSGENLDLSCFANSNPPAQYSWTINGKFQLSGQKLFIPQITPKHNGLYACSARNSATGEESSTSLTIRVI

SEQ ID NO: 11084 - protein, 335 aa, Homo sapiens
  DOMAIN (28)..(73): CARCINOEMBRYONIC ANTIGEN PRECURSOR AMINO-TERMINAL DOMAIN domain identified by eMATRIX, accession number DM00372A, p-value= 1.000e-40, raw score of 19.18
  DOMAIN (114)..(312): Immunoglobulin domain identified by PFam, accession name ig, E-value=3.9e-11, PFam score of 40.9
EENTQAAETMGPLSAPPCTHLITWKGVLLTASLLNFWNPPTTAQVTIEAQPPKVSEGKDVLLLVHNLPQNLAGYIWYKGQMTYVYHYITSYVVDGQRIIYGPAYSGRERVYSNASLLIQNVTQEDAGSYTLHIIKRRDGTGGVTGHFTFTLHLETPKPSISSSNLNPREAMEAVILTCDPATPAASYQWWMNGQSLPMTHRLQLSKTNRTLFIFGVTKYIAGPYECEIRNPVSASRSDPVTLNLLHGPDLPSIYPSFTYYRSGENLYLSCFAESNPRAQYSWTINGKFQLSGQKLSIPQITTKHSGLYACSVRNSATGKESSKSITVKVSDWILP

SEQ ID NO: 11085 - protein, 364 aa, Homo sapiens
  DOMAIN (46)..(91): CARCINOEMBRYONIC ANTIGEN PRECURSOR AMINO-TERMINAL DOMAIN domain identified by eMATRIX, accession number DM00372A, p-value= 6.500e-39, raw score of 19.18
  DOMAIN (90)..(337): Immunoglobulin domain identified by PFam, accession name ig, E-value=3e-08, PFam score of 31.6
  misc_feature (1)...(364): Xaa = X or * as defined in Table 2
AQLTAVLRKFLDPRLISTEENTQAAETMGPLSAPPCTEHIKWKGLLVTASLLNFWNLPTTAQVTIEAQPPKVSEGKDVLLLVHNLPQNLTGYIWYKGQIRDLYHYITSYVVDGQIIIYGPAYSGRETAYSNASLLIQNVTREDAGSYTLHIIKRGDGTRGVTGYFTFTLYLETPKPSISSSNLNPREAMETVILTCDPETPDTSYQWWMNGQSLPMTHRFQLSETNRTLFLFGVTKYTAGPYECEIWESGSASRSDPVTLESPRMGPDLPRIFPFSSPLNYFRERNLGFVPGLGDFXTPPAQYSWTINGKFQLSGQKLFIPQITPKHNGLYACSARNSATGEESSTSLTIRVIAPPGLGTFCFQ

SEQ ID NO: 11086 - protein, 162 aa, Homo sapiens
  misc_feature (1)...(162): Xaa = X or * as defined in Table 2
RPFFPPHSESQNPPRQPDSSPTGTSTXPADTHCPRPVSQAQGGTAEGLXXPRVHGPSPLPHSIGSAPPQCQEGAPAGEWAREPGEDGVPGAPGQNXGKMEFSGAGGQVPSRVVEGVQSHLRSEGPPPACPAVPCAAEGPDGRPGNTGRGGPGLRNQRRWEEW

SEQ ID NO: 11087 - protein, 479 aa, Homo sapiens
  DOMAIN (72)..(117): CARCINOEMBRYONIC ANTIGEN PRECURSOR AMINO-TERMINAL DOMAIN domain identified by eMATRIX, accession number DM00372A, p-value= 1.000e-40, raw score of 19.18
  DOMAIN (158)..(452): Immunoglobulin domain identified by PFam, accession name ig, E-value=7.9e-14, PFam score of 49.6
IRADPAHELENCSCPGKRLSTERGRTAQLTAVLREFLDPRLISTEENTQAAETMGTLSAPPCTQRIKWKGLLLTASLLNFWNLPTTAQVTIEAQPPKVSEGKDVLLLVHNLPQNLTGYIWYKGQMRDLYHYITSYVVDGEIIIYGPAYSGRETAYSNASLLIQNVTREDAGSYTLHIIKGDDGTRGVTGRFTFTLHLETPKPSISSSNLNPRETMEAVSLTCDPETPDASYLWWMNGQSLPMTHSLKLSETNRTLFLLGVTKYYLQDPIECEIRNPVSASRSDPVHPGISCPKLPKPYITINNLNPRENKDVLNFTCEPKSENYTYIWWLNGQSLPVSPRVKRPIENRILILPSVTRNETGPYQCEIRDRYGGVRSDPVTLNVLYGPDLPRIYPSFTYYRSGEVLYLSCSADSNPPAQYSWTINEKFQLPGQKLFIRHITTKHSGLYVCSVRNSATGKESSKSMTVEVSGKVDPKHRWQ

SEQ ID NO: 11088 - protein, 492 aa, Homo sapiens
  DOMAIN (70)..(115): CARCINOEMBRYONIC ANTIGEN PRECURSOR AMINO-TERMINAL DOMAIN domain identified by eMATRIX, accession number DM00372A, p-value= 5.378e-38, raw score of 19.18
  DOMAIN (156)..(468): Immunoglobulin domain identified by PFam, accession name ig, E-value=1.6e-06, PFam score of 26.0
  misc_feature (1)...(492): Xaa = X or * as defined in Table 2
EASLLEDDDGMVYLRPLTSHQYRTAQLRAMLRKFLDPRLSSTEENTQAAETMGPLSAPPCTQRITWKGLLLTASLLNFWNPPTTAQVTIEAEPTKVSKGKDVLLLVHNLPQNLAGYIWYKGQMKDLYHYITSYVVDGQIIIYGPAYSGRETVYSNASLLIQNVTREDAGSYTLHIVKRGDGTRGETGHFTFTLYLETPKPSISSSNLYPREDMEAVSLTCDPETPDASYLWWMNGQSLPMTHSLQLSKNKRTLFLFGVTKYTAGPYECEIRNPVSASRSDPVTLNLLPKLPKPYITINNLNPRENKDVLAFTCEPKSENYTYIWWLNGQSLPGSVPRVKRPIENRVLIFTPCSRGIETGPYQCEIRDRLWVGLRSLPSSPWNVPLMGPDLPRIYPYFTYLPFQGGKPSDLSWLSRESXPHRAGVFFWGQFNGGSFSGIQGQKLFIPQITTKHSGLYACSVRNSATGMESSKSMTVKVSAPSGTGHLPGLNPL

SEQ ID NO: 11089 - protein, 678 aa, Homo sapiens
  DOMAIN (276)..(321): CARCINOEMBRYONIC ANTIGEN PRECURSOR AMINO-TERMINAL DOMAIN domain identified by eMATRIX, accession number DM00372A, p-value= 4.000e-39, raw score of 19.18
  DOMAIN (422)..(665): Immunoglobulin domain identified by PFam, accession name ig, E-value=2e-10, PFam score of 38.6
MLEAAVHAPGNSDVTRTRCATQVLKPLVSYGQAETGFSVPQLKYPPWDGLLHRDIPPGTLPVEHSPCSLAALQFLNATSTHGECSAFARRKLESSFSQHSLQEGHRHGSRLSPSGAPVKDSGSRTAPGSRGGQQHPSQLLLCGRDDLFQASSGHGPFLLLFPELPSPRDALQLLREASKFPTDKRQGRSWSVAITNTAATSLEWVPFHAFAIPRSTLVSQQRLSTERGRTAQLTAVLREFLDPRLISTEENTQAAETMGTLSAPPCTQRIKWKGLLLTASLLNFWNLPTTAQVTIEAEPTKVSEGKDVLLLVHNLPQNLTGYIWYKGQMRDLYHYITSYVVDGEIIIYGPAYSGRETAYSNASLLIQNVTQEDAGSYTLHIIKRRDGTGGVTGHFTFTLHLETPKPSISSSNLNPREAMEAVILTCDPATPAAGYQWWMNGQRLSPMTHRLQLSKTNRTLFIFGVTKYIAGPYECEIRNPVSASRSDPVTLNLLPKLPKPYITINNLNPRENKDVLNFTCEPKSENYTYIWWLNGQSLPVSPRVKRPIENRILILPSVTRNETGPYQCEIRDRYGGIRSDPVTLNVLYGPDLPRIYPSFTYYRSGEVLYLSCFADSNPPAQYSWTINGKVFSLQGQKLSIPQITTKHSGLYACSVRNSATGKESSKSITVKVSDWILP

SEQ ID NO: 11090 - protein, 83 aa, Homo sapiens
TEEHLYSPHWKGCGRKVKRLFQVRRGRGWIQTRQPGSMVKEPPLSEAGAESHVSCRQGDCSRPPSFPLSPERVTPWLPDSHTW

SEQ ID NO: 11091 - protein, 781 aa, Homo sapiens
  DOMAIN (672)..(727): Domain present in ZO-1 and Unc5-like netrin receptors domain identified by eMATRIX, accession number PF00791B, p-value=3.394e- 09, raw score of 28.49
  DOMAIN (595)..(735): Ank repeat domain identified by PFam, accession name ank, E- value=2.4e-14, PFam score of 61.1
MRPPRAPVVPPDLGGPRLCPVPAAGGARSPSSPYSVETPYGFHLDLDFLKYIEELERGPAARRAPGPPTSRRPRAPRPGLAGARSPGAWTSSESLASDDGGAPGILSQGAPSGLLMQPLSPRAPVRNPRVEHTLRETSRRLELAQTHERAPSPGRGLVREQMAAALRRLRELEDQARTLPELQEQVRALRAEKARLLAGRAQPEPDGEAETRPDKLAQLRRLTERLATSERGGRARASPRADSPDGLAAGRSEGALQVLDGEVGSLDGTPQTREVAAEAVPETREAGAQAVPETREAGVEAAPETVEADAWVTEALLGLPAAAERELELLRASLEHQRGVSELLRGRLRELEEAREAAEEAAAGARAQLREATTQTPWSCAEKAAQTESPAEAPSLTQESSPGSMDGDRAVAPAGILKSIMKKRDGTPGAQPSSGPKSLQFVGVLNGEYESSSSEDTNDSDGDSENGGAEPPGSSSGSGDDSGGGSDSGTPGPPSGGDIRDPEPEAEAEPQQVAQGRCELSPRLREACVALQRQLSRPRGVASDGGAVRLVAQEWFRVSSQRRSQAEPVARMLEGVRRLGPELLAHVVNLADGNGNTALHYSVSHGNLAIASLLLDTGACEVNRQNRAGYSALMLAALTSVRQEEEDMAVVQRLFCMGDVNAKASQTGQTALMLAISHGRQDMVATLLACGADVNAQDADGATALMCASEYGRLDTVRLLLTQPGCDPSILDNEGPSALAIALEAETGMKVAALLHAHLSSGHPDTQSGVTPLAPQTANTW

SEQ ID NO: 11092 - protein, 170 aa, Homo sapiens
  misc_feature (1)...(170): Xaa = X or * as defined in Table 2
FLANFLCFIRDGFHHVGQDGLHLLTSXSACLGLPKCWDYRREPLRPTSPLLSRPHQALCCLAFGHSAATCTCVNSALAWAGFWNPQAPGFSVAPAHLLTHTVSLSPMPLWATCSPGAGHEAPGLMLQDPFGPPWCSCGPVFHEKTAGCKARAFSGRVCRCKAQALPETGR

SEQ ID NO: 11093 - protein, 103 aa, Homo sapiens
RSKVEAGLAPEPGPLGARVGSPGTRARHGRPGPAGASIGPGCGPNEQVDEQAGPAQLQGPQGPGAPRAIGFPHLRLGGSCKIKGDGPGVRRPGSDRLSSSSPT

SEQ ID NO: 11094 - protein, 71 aa, Homo sapiens
  misc_feature (1)...(71): Xaa = X or * as defined in Table 2
MKAWKKIKDHPTTSTLTXSNRDDVTGGRXDPNHSEXSTTLLGRLYLSXXTHEGKQXLXXSDSAXXGPFXXL

SEQ ID NO: 11095 - protein, 78 aa, Homo sapiens
  misc_feature (1)...(78): Xaa = X or * as defined in Table 2
MDSSHSTTLXPTANPNTGLVEDLDRTGPLSMTTQQSNSQSFSTSHEGLEEDKDHPTTSTLTSSNRNDGHRWKKRPKSF

SEQ ID NO: 11096 - protein, 176 aa, Homo sapiens
  DOMAIN (153)..(173): CD44 ANTIGEN PRECURSOR SIGNATURE domain identified by eMATRIX, accession number PR00658E, p-value=3.143e-24, raw score of 15.24
DTYCFNASAPPEEDCTSVTGPLSMTTQQSNSQSFSTSHEGLEEDKDHPTTPTLTSSNRNDVTGGRRDPNHSEGSTTLLEGYTSHYPHTKESRTFIPVTSAKTGSFGVTAVTVGDSNSNVNRSLSGDQDTFHPSGGSHTTHGSESDGHSHGSQEGGANTTSGPIRTPQIPEWLIILA

SEQ ID NO: 11097 - protein, 145 aa, Homo sapiens
  DOMAIN (29)..(49): CD44 ANTIGEN PRECURSOR SIGNATURE domain identified by eMATRIX, accession number PR00658A, p-value=1.000e-26, raw score of 17.21
  DOMAIN (37)..(84): Extracellular link domain identified by PFam, accession name Xlink, E-value=2.4e-31, PFam score of 73.7
PFAPDTMDKFWWHAAWGLCLVPLSLAQIDLNITCRFAGVFHVEKNGRYSISRTEAADLCKAFNSTLPTMAQMEKALSIGFETCSLHCSQQSKKVWAEEKASDQQWQWSCGGQKAKWTQRRGQQVSGNGAFGEQGVVRNSRPVYDS

SEQ ID NO: 11098 - protein, 335 aa, Homo sapiens
EKVRPTSEAGSLPSGPQPLSGFGRHSRSVLRRPLPRAQGSSSFFRPRTPFAPDTMDKIWWYAAWGLCLVPLSLAQIGECPPQPGQQDGCGVLSADPAAAPPAESALGDWSQPQSREKSLDTRATSGTLELGLQYLIQTGSVLCGGYGGEGLRSLVCFYQQHENELMHLVTCQLLDQGKGCQAGTFKPAEAVCCLLFRYALPPEVESREAVGLVELWSISDCCASSEQGSVGMGLTKPGTGRDLLVCWLGRLGKAQYLGESVPLLQIHLLTGNWAEKCLLTDLENFNASKAGEHSKTMLLFIYFSFHGKRKIKGNCFESNNSKRSNISGKQANLKE

SEQ ID NO: 11099 - protein, 742 aa, Homo sapiens
  DOMAIN (48)..(101): Link domain proteins domain identified by eMATRIX, accession number BL01241, p-value=1.000e-40, raw score of 35.81
  DOMAIN (31)..(119): Extracellular link domain identified by PFam, accession name Xlink, E-value=1.3e-66, PFam score of 155.1
MDKFWWHAAWGLCLVPLSLAQIDLNITCRFAGVFHVEKNGRYSISRTEAADLCKAFNSTLPTMAQMEKALSIGFETCRYGFIEGHVVIPRIHPNSICAANNTGVYILTYNTSQYDTYCFNASAPPEEDCTSVTDLPNAFDGPITITIVNRDGTRYVQKGEYRTNPEDIYPSNPTDDDVSSGSSSERSSTSGGYIFYTFSTVHPIPDEDSPWITDSTDRIPATTLMSTSATATETATKRQEAWDWFSWLFLPSESKNHLHTTTQMAGTSSNTISAGWEPNEENEDERDRHLSFSGSGIDDDEDFISSTISTTPRAFDHTKQNQDWTQWNPSHSNPEVLLQTTTRMTDVDRNGTTAYEGNWNPEAHPPLIHHEHHEEEETPHSTSTIQATPSSTTEETATQKEQWFGNRWHEGYRQTPREDSHSTTGTAAASAHTSHPMQGRTTPSPEDSSWTDFFNPISHPMGRGHQAGRRMDMDSSHSTTLQPTANPNTGLVENLDRTGPLSMTTQQSNSQSFSTSHEGLEEDKDHPTTSTLTSSNRNDVTGGRRDPNHSEGSTTLLEGYTSHYPHTKESRTFIPVTSAKTGSFGVTAVTVGDSNSNVNRSLSGDQDTFHPSGGSHTTHGSESDGHSHGSQEGGANTTSGPIRTPQIPEWLIILASLLALALILAVCIAVNSRRRCGQKKKLVINSGNGAVEDRKPSGLNGEASKSQEMVHLVNKESSETPDQFMTADETRNLQNVDMKIGV

SEQ ID NO: 11100 - protein, 531 aa, Homo sapiens
  DOMAIN (86)..(139): Link domain proteins domain identified by eMATRIX, accession number BL01241, p-value=1.000e-40, raw score of 35.81
  DOMAIN (69)..(157): Extracellular link domain identified by PFam, accession name Xlink, E-value=3e-68, PFam score of 158.8
QPLPGSVRHPRPVLRRPLPRAQGSSSSFRPRPPFAPDTMDKFWWHAAWGLCLVPLSLAQIDLNITCRFAGVFHVEKNGRYSISRTEAADLCKAFNSTLPTMAQMEKALSIGFETCRYGFIEGHVVIPRIHPNSICAANNTGVYILTSNTSQYDTYCFNASAPPEEDCTSVTDLPNAFDGPITITIVNRDGTRYVQKGEYRTNPEDIYPSNPTDDDVSSGSSSERSSTSGGYIFYTFSTVHPIPDEDSPWITDSTDRIPATNMDSSHSTTLQPTANPNTGLVEDLDRTGPLSMTTQQSNSQSFSTSHEGLEEDKDHPTTSTLTSSNRNDVTGGRRDPNHSEGSTTLLEGYTSHYPHTKESRTFIPVTSAKTGSFGVTAVTVGDSNSNVNRSLSGDQDTFHPSGGSHTTHGSESDGHSHGSQEGGANTTSGPIRTPQIPEWLIILASLLALALILAVCIAVNSRRRCGQKKKLVINSGNGAVEDRKPSGLNGEASKSQEMVHLVNKESSETPDQFMTADETRNLQNVDMKIGV

SEQ ID NO: 11101 - protein, 299 aa, Homo sapiens
  DOMAIN (61)..(114): Link domain proteins domain identified by eMATRIX, accession number BL01241, p-value=1.000e-40, raw score of 35.81
  DOMAIN (44)..(133): Extracellular link domain identified by PFam, accession name Xlink, E-value=1.5e-62, PFam score of 145.7
FPGSTPTPFAPDTMDKFWWHAAWGLCLVPLSLAQIDLNITCRFAGVFHVEKNGRYSISRTEAADLCKAFNSTLPTMAQMEKALSIGFETCRYGFIEGHVVIPRIHPNSICAANNTGVYILTYNTSQYDTYCFNASAPPEEDCTSVTDLPNAFDGPITITIVNRDGTRYVQKGEYRTNPEDIYPSNPTDDDVSSGSSSERESTSGGYIFYTFSTVHPIPDEDSPWITDSTDRIPATRDQDTFPPQWGFPLPLHGSEFRWDTHMGSQGRWEQTQPLGPIRDTPNSQNGLIHLGHPLLALGL

SEQ ID NO: 11102 - protein, 108 aa, Homo sapiens
AGPGEVAGDGRDSGGPAGGRRCWLNWSGSGKSLRKGNPSVSIYCFCLPNHYLFDRNSCLRSSAGTKSGSYPPQISSLMLILVPPCVPQQTHPGLDLKTQKLSLLSALI

SEQ ID NO: 11103 - protein, 84 aa, Homo sapiens [sequence omitted]

SEQ ID NO: 11104 - protein, 128 aa, Homo sapiens
  DOMAIN (38)..(77): N-acetyltransferase domain identified by eMATRIX, accession number PF00797A, p-value=6.186e-22, raw score of 14.57
  DOMAIN (48)..(128): N-acetyltransferase domain identified by PFam, accession name Acetyltransf2, E-value=0.071, PFam score of -110.4
  misc_feature (1)...(128): Xaa = X or * as defined in Table 2
IQARKKQQSVLGIKTEDQGTFNLLRKGIMDIEAYLERIGYKKFTSKLDFETLTDILSHQIPAVSFDNLTVLCGDAMDLGLEAIFDQAVRXNRGGWILQVNHLLYWALTTIGYETTKIGRYGYQTPAEK

SEQ ID NO: 11105 - protein, 61 aa, Homo sapiens
  misc_feature (1)...(61): Xaa = X or * as defined in Table 2
IVEYRGMWDYRLLFFFPETESCSVAQVGTQWHDLSSLQPLSPGSSNSPASASXVAGITGTH

SEQ ID NO: 11106 - protein, 90 aa, Homo sapiens
SAQMAVTTADPRVRPRVRTTVFTSIAHTDTMVHLTPVEKSAVTALWAKVNVNEVGGEAPGQGCWVVLPLGPPKGPLKPFGGICPNSLNAG

SEQ ID NO: 11107 - protein, 80 aa, Homo sapiens
RHVLFLLKNGANDVKHHRWFRSVDWKAVPQRKLSRPEAKCLLHGLRTFPVFSVPQIWHCSNLLCMRSQGPAVAGVSALKK

SEQ ID NO: 11108 - protein, 67 aa, Homo sapiens
  DOMAIN (21)..(51): Protein kinase C terminal domain identified by PFam, accession name pkinase_C, E-value=1.3e-06, PFam score of 25.5
RHVLFLLKNGANDVKHHRWFRSVDWKAVPQRKLKPPIVPKIAGDGDTSNFETYPENDWDTAAPVPQK

SEQ ID NO: 11109 - protein, 283 aa, Homo sapiens
  DOMAIN (45)..(93): Receptor tyrosine kinase class II proteins domain identified by eMATRIX, accession number BL00239B, p-value=5.442e-13, raw score of 25.15
  DOMAIN (4)..(188): Eukaryotic protein kinase domain identified by PFam, accession name pkinase, E-value=3.1e-67, PFam score of 236.8
MAEGTGTFGRVHLVKEKTAKHFFALKVMSIPDVIRLKQEQHVHNEKSVLKEVSHPFLIRLFWTWHDERFLYMLMEYVPGGELFSYLRNRGRFSSTTGLFYSAEIICAIEYLHSKEIVYRDLKPENILLDRDGHIKLTDFGFAKKLVDRTWTLCGTPEYLAPEVIQSKGHGRAVDWWALGILIFEMLSGLNQSIDCDLCQPIRIQQASTSQNSVSVNQLEPNKCQTVRAHRGSTHQNSTSVDSSEPKCQTHQNSTSAHQSEPNKCQPIRTQQVSAYQNSMSISP

SEQ ID NO: 11110 - protein, 389 aa, Homo sapiens
  DOMAIN (252)..(283): Protein kinases ATP-binding region proteins domain identified by eMATRIX, accession number BL00107A, p-value=1.750e-26, raw score of 18.39
  DOMAIN (197)..(387): Eukaryotic protein kinase domain identified by PFam, accession name pkinase, E-value=2.7e-51, PFam score of 183.9
  misc_feature (1)...(389): Xaa = X or * as defined in Table 2
PQQSPECDVPLPVSVCSHWSIPTSHRLLRVLVTVECELYVRWPRCNADLTCTKAVQNGWDLLKVPTCLHLLLAVPGVGLFIDEGVKQGFSVETFRDTRGVLVHGCIMSCLCNNRVRPYLGKKQKSKKTTDVGVEVEESGRGCAAGAEEVFQCMQQGSHSAAEGQESSSKVESGRHSYNLYLWVISPRTPASLQNLQILKCIRFWTWHEERFLYMLMEYVPGGELFSYLRNRGHFSSTTGLFYSAEIICAIEYLHSKEIVYRDLKPENILLDRDGHIKLTDFGFAKKLAYRLMWKSLLSEKRWVWRCGGEAKERXQXQQFGWVPASRKVRSXSQDTCPHHRKQGRLRTWTLCGTPEYLAPEVIQSKGHGRAVDWWALGILIFEMLSGWVL

SEQ ID NO: 11111 - protein, 403 aa, Homo sapiens
  DOMAIN (161)..(209): Receptor tyrosine kinase class II proteins domain identified by eMATRIX, accession number BL00239B, p-value=6.143e-13, raw score of 25.15
  DOMAIN (118)..(331): Eukaryotic protein kinase domain identified by PFam, accession name pkinase, E-value=3.7e-70, PFam score of 246.5
APPSHCLCVSVSRAEPRTQRRGRAWGASVDAAAAAAPPSEAASRGVRLPERSGLARRPGPECLPMEAPGPAQAAAAESNSREVTEDAADWAPALCPSPEARSPEAPAYRLQDCDALVTMGTGTFGRVHLVKEKTAKHFFALKVMSIPDVIRRKQEQHVHNEKSVLKEVSHPFLIRLFWTWHEERFLYMLMEYVPGGELFSYLRNRGHFSSTTGLFYSAEIICAIEYLHSKEIVYRDLKPENILLDRDGHIKLTDFGFAKKLVDRTWTLCGTPEYLAPEVIQSKGHGRAVDWWALGILIFEMLSGFPPFFDDNPFGIYQKILAGKLYFPRHLDFHVKDGANDVNHHRWFRSVDWKAVPQRKLKPPIVPTIAGNGDTSNFETYPEHDWDTAAPVPQKDLEIFKNF

SEQ ID NO: 11112 - protein, 227 aa, Homo sapiens
  DOMAIN (189)..(220): Protein kinases ATP-binding region proteins domain identified by eMATRIX, accession number BL00107A, p-value=1.750e-26, raw score of 18.39
  DOMAIN (12)..(224): Eukaryotic protein kinase domain identified by PFam, accession name pkinase, E-value=7.3e-37, PFam score of 135.9
MAAEVLTVMAEGTGTFGRVHLVKEKTAKHFFALKVMSIPDVIRRKQEQHVHNEKSVLKEVSHPFLIRLWPRCNADLTCTKAVQNGWDLLKVPTCLHLLLAVPGVGLFIDEGVKQGFSVELTAYPLPCPGGALSVCCPCRFWTWHEERFLYMLMEYVPGGELFSYLRNRGHFSSTTGLFYSAEIICAIEYLHSKEIVYRDLKPENILLDRDGHIKLTDFGFAKKLVDR

SEQ ID NO: 11113 - protein, 214 aa, Homo sapiens
  DOMAIN (39)..(55): Protein kinases ATP-binding region proteins domain identified by eMATRIX, accession number BL00107B, p-value=3.077e-12, raw score of 13.31
  DOMAIN (15)..(58): Eukaryotic protein kinase domain identified by PFam, accession name pkinase, E-value=9.9e-15, PFam score of 57.0
SQDTCPHHRKQGRLRTWTLCGTPEYLAPEVIQSKGHGRAVDWWALGILIFEMLSGAFPKHVSSNASPGLQNWGRFPPFFDDNPFGIYQKILAGKLYFPRHLDFHVKCQTPKEKQKTKNKVIFLHARHQKQNKTNNNNNSNNKMKFIKNGANDVKHHRWFRSVDWKAVPQRKLKPPIVPTIAGNGDTSNFETYPEHDWDTAAPVPQKDLEIFKNF

SEQ ID NO: 11114 - protein, 420 aa, Homo sapiens
  DOMAIN (159)..(207): Receptor tyrosine kinase class II proteins domain identified by eMATRIX, accession number BL00239B, p-value=5.442e-13, raw score of 25.15
  DOMAIN (111)..(371): Eukaryotic protein kinase domain identified by PFam, accession name pkinase, E-value=1.1e-72, PFam score of 254.9
APPSHCPRRSVSRAGPRTRRRERAWGASVDAAAAPPSEAASREARLPERSGLARCPGPECVPMEAPGLAQAAAAESDSRKVAEETPDGAPALCPSPEALSPEPPVYSLQDFDTLATVGTGTFGRVHLVKEKTAKHFFALKVMSIPDVIRLKQEQHVHNEKSVLKEVSHPFLIRLFWTWHDERFLYMLMEYVPGGELFSYLRNRGRFSSTTGLFYSAEIICAIEYLHSKEIVYRDLKPENILLDRDGHIKLTDFGFAKKLVDRTWTLCGTPEYLAPEVIQSKGHGRAVDWWALGILIFEMLSGFPPFFDDNPFGIYQKILAGKIDFPRHLDFHVKDLIKKLLVVDRTRRLGNMKNGANDVKHHRWFRSVDWEAVPQRKLKPPIVPKIAGDGDTSNFETYPENDWDTAAPVPQKDLKIFKNF

SEQ ID NO: 11115 - protein, 54 aa, Homo sapiens
  misc_feature (1)...(54): Xaa = X or * as defined in Table 2
MPMXAQIEEPQPIQVKTRTNLRLTQLREQDQTQKCLCPLYNQQAPRKKFLLLWA

SEQ ID NO: 11116 - protein, 152 aa, Homo sapiens
  misc_feature (1)...(152): Xaa = X or * as defined in Table 2
PWAKLGLSCVPAWQVQVLAICRWKEVGILDFLFFFVFFFLRXSLDSDTQAGVQWCDLGSLQTPLPGFKWFSCPSLPSSWDYRHAPPRSADFCIFMXRWGFTMLAKLVSNSXPQCDLPASASQSAGITGVSQCTRRNLGIFIDGTSVSDSSRT

SEQ ID NO: 11117 - protein, 729 aa, Homo sapiens
  DOMAIN (200)..(239): PROTEIN ZINC FINGER ZINC-FINGER METAL-BINDING NU domain identified by eMATRIX, accession number PD01066, p-value=3.512e-31, raw score of 19.43
  DOMAIN (366)..(676): Zinc finger, C2H2 type domain identified by PFam, accession name zf-C2H2, E-value=1.9e-55, PFam score of 197.6
MDPGTLQSASQGPTAINPCDYVLKRRNIQTSWQRLTPIIKWHVYILMIGPGEKEAGRNLGIFGKWTPFPKIPAKRLRESNCPVDAQEIWLPQAFREYLGRRGNFGPGRRTCEFWEVESICSVESWELWLRQADSGDSGKCSPDACGIIDTSGLRAGHCYLTRLWHVSGRIPPSFKLHHPGVCKFPKVGGKMTTFKEAVTFKDVAVVFTEEELGLLDPAQRKLYRDVMLENFRNLLSVGHQPFHQDTCHFLREEKFWMMGTATQREGNSGGKIQTELESVPEAGAHEEWSCQQIWEQIAKDLTRSQDSIINNSQFFENGDVPSQVEAGLPTIHTGQKPSQGGKCKQSFSDVPIFDLPQQLYSEEKSYTCDECGKSICYISALHIHQRVHMGEKCYKCDVCGKEFSQSSHLQTHQRVHTGEKPFKCGQCGKGFSRRSALNVHHKLHTGEKPYICEACGKAFIHDSQLKEHKRIHTGEKPFKCDICGKTFYFRSRLKSHSMVHTGEKPFRCDTCDKSFHQRSALNRHCMVHTGEKPYRCEQCGKGFIGRLDFYKHQVVHTGEKPYNCKECGKSFRWSSCLLNHQRVHSGEKSFKCEECGKGFYTNSQLSSHQRSHSGEKPYKCEECGKGYVTKFNLDLHQRVHTGERPYNCKECGKNFSRASSILNHKRLHSPEKNPFKCEDCGKRLVHRTYRKDQPRDYSGENPSKCEDCGRRYKRRLNLDILLSLFLNDT

SEQ ID NO: 11118 - protein, 1518 aa, Homo sapiens
  DOMAIN (247)..(286): PROTEIN ZINC FINGER ZINC-FINGER METAL-BINDING NU domain identified by eMATRIX, accession number PD01066, p-value=3.512e-31, raw score of 19.43
  DOMAIN (388)..(1461): Zinc finger, C2H2 type domain identified by PFam, accession name zf-C2H2, E-value=1.9e-167, PFam score of 569.7
MDGAKAFFSAVAAGFVIILTCQLQWQWQHGGVHAHQLWQLASGYRDACFCVSTYSSGPSEFPGPTLGTLNELAIDLEERKHRRKAKVWKGEGGGLRSPRQSLLAFRAVLASRGTRSCHVSPYLGVSGALSSPNPHPSTTGAGPIPPVQRWGLPQINQKNREIAIPLTLGMSTHLRRGCKNMSRFSPSLHCCTTPISTNFTDPGSHCKGAHGDICLLIQNLKGALPMSINRSYFNAHPLLQISEAVTFKDVAVVFTEEELGLLDPAQRKLYRDVMLENFRNLLSVGNQPIPTQDTFHFLGKEKFWKMKTTSQREGNSGGKIQIEMETVPEAGPHEEWSCQQIWEQIASDLTRSQNSIRNSSQFFKEGDVPCQIEARLSISHVQQKPYRCNECKQSFSDVSVFDLHQQSHSGEKSHTCGECGKSFCYSPALHIHQRVHMGEKCYKCDVCGKEFNQSSHLQTHQRVHTGEKPFKCGQCGKGFHSRSALNVHCKLHTGEKPYNCEECGKAFIHDSQLQEHQRIHTGEKPFKCDICGKSFRVRSRLNRHSMVHTGEKAFRCDTCGKNFRQRSALNSHSMVHIEEKPYKCEQCGKGFICRRDFCKHQMVHTGEKPYNCKECGKTFRWSSCLLNHQQVHSGQKSFKCEECGKGFYTNSRRSSHQRSHNGEKPYNCEECGKDYKRRLDLEFHQRVHTGERPYNCKECGKSFGWASCLLKHQRLHSGEKPFKCEECGKRFTQSSQLHSHQTCHTGEKLYKCEQCEKGYNSKFNLDMHQRVHGGERPYNCKECGKSFGWASCLLKHQRLHSGEKPLKSGVWEEIYSEFTASFTSESSGQKLVSIPLGQSFQKKEKAAIFAVLQLSLVTPPGTGKTEATRVSSRPQQTVAALQLLTVSGLTVKNRQKTTRTSTKRPHKNPIQGSATSRLKSKWTPFPKIPAKRLRESNCPVDAQEIWLPQAFRELWHVSGRIPPSFKLHHPGVCKFPKVGGKMTTFKEAVTFKDVAVVFTEEELGLLDPAQRKLYRDVMLENFRNLLSVGHQPFHQDTCHFLREEKFWMMGTATQREGNSGGKIQTELESVPEAGAHEEWSCQQIWEQIAKDLTRSQDSIINNSQFFENGDVPSQVEAGLPTIHTGQKPSQGGKCKQSISDVPIFDLPQQLYSEEKSYTCDECGKSICYISALHVHQRVHVGEKLFMCDVCGKEFSQSSHLQTHQRVHTGEKPFKCEQCGKGFSRRSALNVHRKLHTGEKPYICEACGKAFIHDSQLKEHKRIHTGEKPFKCDICGKTFYFRSRLKSHSMVHTGEKPFRCDTCDKSFHQRSALNRHCMVHTGEKPYRCEQCGKGFIGRLDFYKHQVVHTGEKPYNCKECGKSFRWSSCLLNHQRVHSGEKSFKCEECGKGFYTNSQLSSHQRSHSGEKPYKCEECGKGYVTKFNLDLHQRVHTGERPYNCKECGKNFSRASSILNHKRLHCQKKPFKCEDCGKRLVHRTYRKDQPRDYSGENPSKCEDCGRRYKRRLNLDILLSLFLND

SEQ ID NO: 11119 - protein, 460 aa, Homo sapiens
  DOMAIN (119)..(158): TRANSCRIPTION PROTEIN DNA-BINDIN domain identified by eMATRIX, accession number PD02448A, p-value=2.841e-20, raw score of 9.37
  DOMAIN (114)..(183): HMG (high mobility group) box domain identified by PFam, accession name HMG_box, E-value=8.8e-27, PFam score of 102.4
FRAASGRETRAALGASQCLTPHPLPRVGGGGASGGGLRGAGQAWSAMSSPDAGYASDDQSQTQSALPAVMAGLGPCPWAESLSPIGDMKVKGEAPANSGAPAGAAGRAKGESRIRRPMNAFMVWAKDERKRLAQQNPDLHNAELSKMLGKSWNALTLAEKRPLVEEAERLRVQHMQDHPNYKYRPRRRKQVKRLKRVEGGFMHGMDEPQAAAMGPEGGRVAMDGLGLQFPEQGFPAGPPLLPPHMGGHYRDCQSLGAPPLDGYPLPTPDTSPLDGVDPDPAFFAAPMPGDCPAAGTYSYAQVSDYAGPPEPPAGPMHPRLGPEPAGPSIPGLLAPPSALHVYYGAMGSPGAGGGRGFQMQPQHQHQHQHQHHPPGPGQPSPPPEALPCRDGTDPSQPAELLGEVDRTEFEQYLHFACKPEMGLPYQGHDSGVNLPDSHGAISSEVSDASSAVYYCNYPDV

SEQ ID NO: 11120 - protein, 109 aa, Homo sapiens
ESDGGKRKKKSRGDPSQLEEKISKGCPQRRKKPRLYRPSNYNRAFRRMRRARLPTRTSPETRTPQPHSPHSPERTPTPPPGRPPFLGAGQLQRLFMGIPQVGDCPPPSS

SEQ ID NO: 11121 - protein, 330 aa, Homo sapiens
  misc_feature (1)...(330): Xaa = X or * as defined in Table 2
FVDAAGCPLRCSVVTGIVVLQKSGNRPEDLRAAQLPGRLELLLNNFCSAMSPAPDAAPAPASISLFDLSADAPVFQGLSLVSHAPGEALARAPRTSCSGSGERESPERKLLQGVLWTISEKLFCSTCDQTFQNHQEQREHYKLDWHRFNLKQRLQGQPLLSALGLXKAELHRRSFPAFSGIRRIQDSASEEDLQTLDRERATFEKLSRPPGFYPHRVLFQNAQGQFSLCLPLCPRLLIRIPQKRQNLLLTRTLQSRGPRDCVVLMAAAGHFAGAIFQGREVVTHKTFHRYTVRAKQGHSQGAFGNARGGPSHSAGANLRRYNEATLYKVS

SEQ ID NO: 11122 - protein, 148 aa, Homo sapiens
  DOMAIN (3)..(148): Putative undecaprenyl diphosphate synt domain identified by PFam, accession name UPP_synthetase, E-value=1.4e-18, PFam score of 75.2
WWNSLEVTVYAFSIENFKRSKSEVDGLMDLARQKFSRLMEEKEKLQKHGVCIRVLGDLHLLPLDLQELIAQAVQATKNYNNDISESLLDKCLYTNRSPHPDILIRTSGEVRLSDFLLWQTSHSCLVFQPVLWPEYTFWNLFEAILQFQ

SEQ ID NO: 11123 - protein, 340 aa, Homo sapiens
  DOMAIN (39)..(264): Putative undecaprenyl diphosphate synt domain identified by PFam, accession name UPP_synthetase, E-value=2.3e-86, PFam score of 300.3
SSDWKRTMSWIKEGELSLWERFCANIIKAGPMPKHIAFIMDGNRRYAKKCQVERQEGHFTGFKQLAETLRWCLNLGILEVTVYAFSIENFKRSKSEVDGLMDLARQKFSRLMEEKEKLQKHGVCIRVLGDLHLLPLDLQELIAQAVQATKNYNKCFLNVCFAYTSRHEISNAVREMAWGVEQGLLDPSDISESLLDKCLYTNRSPHPDILIRTSGEVRLSDFLLWQTSHSCLVFQPVLWPEYTFWNLFEAILQFQMNHSVLQKARDMYAEERKRQQLERDQATVTEQLLREGLQASGDAQLRRTRLHKLSARREERVQGFLQALELKRADWLARLGTASA

SEQ ID NO: 11124 - protein, 121 aa, Homo sapiens
EDLLDLDEELRYSLATSRAKMGRRAQQESAQAENHLNGKNSSLTLTGETSSAKLPRCRQGGWAGDSVKASNGTQTGKQQLDLNACYHKTHHRDLGLASLEEADIPIIPDLEEVQEEDFVLQ

SEQ ID NO: 11125 - protein, 155 aa, Homo sapiens
RRWRICSTWTRSFATAWLPPAPSANFPRTDRSQGDRGAPAGFALAPILEFFLWDTSSQKFLQKPHCFMHGRERAKMGRRAQQESAQAENHLNGKNSSLTLTGETSSAKLPRCRQGGWAGDSVKASKFRRKASEEIEDFRLRPQSLNGSDYGGDIP

SEQ ID NO: 11126 - protein, 136 aa, Homo sapiens
NPQKVENTLSPPASRTVGNFRAFLRFLEPRVRTSPEQIDHRRAKMGRRAQQESAQAENHLNGKNSSLTLTGETSSAKLPRCRQGGWAGDSVKASKFRRKASEEIEEYVSSILILMVSYVDLGQQGRLGGHDLFHLC

SEQ ID NO: 11127 - protein, 129 aa, Homo sapiens
  misc_feature (1)...(129): Xaa = X or * as defined in Table 2
MKYSAIQTLDGEIDLKLLTKVLAPEHEVRXVQWWQQFPGLSTLAIPINPAELPGLALCLPXRPWNGREKVSLQLREKALSLSYPAKPFLEDDVGWDWDHLFTEVSSEVLTEWDPLQTEKEDPAGQARHT

SEQ ID NO: 11128 - protein, 236 aa, Homo sapiens
GPIRGPWGPGFGGWGGATPPAPTSLRRLRAAGLAPRRRAKMGRRAQQESAQAENHLNGKNSSLTLTGETSSAKLPRCRQGGWAGDSVKASKFRRKASEEIEDFRLRPQSLNGSDYGGDIPIIPDLEEVQEEDFVLQVAAPPSIQIKRVMTYRDLDNDLMKYSAIQTLDGEDIDLKLLTPKVLAPEHEVRERNPSWQDDVGWDWTHLFTEVSSEVSFTEWDPLQTEKEDPGGQARHT

SEQ ID NO: 11129 - protein, 103 aa, Homo sapiens
  DOMAIN (10)..(94): Ribosomal L28e protein family domain identified by PFam, accession name Ribosomal_L28e, E-value=4.2e-31, PFam score of 116.8
AAAKGAAAMSAHLQWMVVRNCSSFLIKRNKQTYSTEPNNLKARNSFRYNKNARATLSSIRHMIRKNKYRPDLRMAAIRRASAILRSQKPVMVKRKRTRPTKSS

SEQ ID NO: 11130 - protein, 45 aa, Homo sapiens
VAAAKGAAAMSAHLQWMVVRNCSSFLIKRNKQPHQELLSPLPPEQ

SEQ ID NO: 11131 - protein, 56 aa, Homo sapiens
HEGQRKPATSYVRTTINKNARATLSSIRHMIRKNKYRPDLRMDMLASTGSGLCCSV

SEQ ID NO: 11132 - protein, 414 aa, Homo sapiens
  misc_feature (1)...(414): Xaa = X or * as defined in Table 2
DRVSLLLPRLECNGAILAHCNLCLSGFKXFSCLSLPSNWDYREVPPHQLIFVFLVEMGFHHIAQAGLELLTSSIPPTLAFPKCWDYRRDHHAWLFFFCSENSFTLLPRLEXGGLISDHCNLRLLGSSDLPASASQEPRLQACATTPRXFLYFWXRRGFTMLARLVLNSXPQVHPPASASQSAEIIGVSHHTWPQEVFLFLNLFIYLRWSLALSPRLECSDGISAHCKLRPPGSSILLPQPPEXLGLQAPATTPGXFFCIFSRDGFSPCXPGGSXSPDLVICLPRPPKVLGLQVXATTPGYFYFFETGTHSVTWAAVQWYTIAHCSLELLSSSDPPTSSSQVIGTTGAPHHAHLIYLFIYLFIFIEMRVPCVVQAGLELLSSRDPFAWASQSAEITGMSHRAQLGIIFKAPRMSV

SEQ ID NO: 11133 - protein, 70 aa, Homo sapiens
  misc_feature (1)...(70): Xaa = X or * as defined in Table 2
MCKALGTPYSPQQQRLGTEASSVHRTCWHLLGQGSAARXXXXXXXXXXXXXXXXXXXXXXVSIDPTTQGX

SEQ ID NO: 11134 - protein, 97 aa, Homo sapiens
  DOMAIN (12)..(95): Ribosomal L28e protein family domain identified by PFam, accession name Ribosomal_L28e, E-value=1.2e-19, PFam score of 78.7
QVAAAKGAAAMSAHLQWMVVRNCSSFLIKRNKQTYSTEPNNLKARNSFRYNGLIHRKTVGVEPAADGKGVVVVIKRRSGEFCLVWARERPLSRVWEL

SEQ ID NO: 11135 - protein, 91 aa, Homo sapiens
  DOMAIN (24)..(91): Ribosomal L28e protein family domain identified by PFam, accession name Ribosomal_L28e, E-value=2.2e-11, PFam score of 51.2
CTPLTPGRPTRPQVAAAKGAAAMSAHLQWMVERNCSSFLIKRNKQTYSTEPNNLKARNSFRYNGLIHRKTVGVEPAADGKGVEVVIKRRSE

SEQ ID NO: 11136 - protein, 127 aa, Homo sapiens
  DOMAIN (15)..(127): Ribosomal L28e protein family domain identified by PFam, accession name Ribosomal_L28e, E-value=8.8e-33, PFam score of 122.3
RIRHEAAAKGAAAMSAHLQWMVVRNCSSFLIKRNKQTYSTEPNNLKARNSFRYNGLISPARLWGVEPAADGKGVVVVIKRRSGQRKPATSYLRTTINKNARATLSSIRHMIRKNKYRPDLAHGHAGI

SEQ ID NO: 11137 - protein, 184 aa, Homo sapiens
  DOMAIN (13)..(148): Ribosomal L28e protein family domain identified by PFam, accession name Ribosomal_L28e, E-value=3e-06, PFam score of 27.7
VAAAKGSRRQCLRHLQWMVVRNCSSFLIKRNKQDPTALSPNNLKARNSFRYNGLIHRKDCGTWSRSADGKGVVVVIKRRSGQRKLATSYVAGPPSTRNARSHASGRHQVHIDPARNKLPPPTCRMGSPFRRAQRPFLAQAGRLVDWLKEGRRDPAPPRSSLKPLGPQKQLKSAGVFSKKKKKSR

SEQ ID NO: 11138 - protein, 46 aa, Homo sapiens
DRRAGDPWPRTHEFGSPEASLQASAWRDGKKVSRSELKPLPLRTLS

SEQ ID NO: 11139 - protein, 100 aa, Homo sapiens
  misc_feature (1)...(100): Xaa = X or * as defined in Table 2
VGIWXPVTNFGVISGTKAIEMDXGTPYIHALTNGLLTVEAPHKERIALKPGYGKYLSINSDELVVGRSDAIGPREQWEPVFQNDGHPVMRMNSLQLKATI

SEQ ID NO: 11140 - protein, 237 aa, Homo sapiens
  misc_feature (1)...(237): Xaa = X or * as defined in Table 2
AMAXYSYVKSSKLVLKGTSKKKKSTDKKRKREDEETQLDIVGIWXTVTNFGEISGTIAIWNGRKGTYIHALDNGLFTLGAPHKERIALKSGYGKYLGINSDGLVVGRSDAIGPREQCEPVFQNGKMALLASNSCFIRCNEAGDIEAKSKTAGEEEMIKIRSCAERETKKKDDIPEEDKGNVKQCEINYVKKFQSFQDHKLKISKEDSKILKKARKDGFLHETLLDRRAKLEADRYCK

SEQ ID NO: 11141 - protein, 187 aa, Homo sapiens
  misc_feature (1)...(187): Xaa = X or * as defined in Table 2
EPSRGVWPHEDARINGSKKKKSKEKKRKREEDEETQFDIVGIWXTVTNFDEISGTIAIEMDEGTYIHALDNGLFTLGAPHKEGKMALLASNGCFIRCNEAGDIEAKSKTAGEEEMIKIRSCAERETKKKDDIPEEDIGNVKQCEINYVKKFQSFQEHKLKISKEDSKILKKAQKDGFLHETLLDRGP

SEQ ID NO: 11142 - protein, 235 aa, Homo sapiens
  misc_feature (1)...(235): Xaa = X or * as defined in Table 2
YVQSLKQILSGCIXESIAIKKKKNKDKKRKREEDEETQLDIVGIWWTVTNFGEISGTIAIEMDKGTYIHALDNGLFTLGAPHKEVDEGPSPPEQFTAVKLSDSRIALKSGYGKYLGINSDGLVVGRSDAIGPREQWEPVFKMGKMALSTSNSCFIRIHEAEDIEAKSKTAGEEEMIQGSPXSSVQPFHLLWTFAFILTQEHRSLLLKIRSCAERETKKKDDIPEEDKGNIKQCEI

SEQ ID NO: 11143 - protein, 111 aa, Homo sapiens
MGRARWLTLVIPALWEAEAGGSREVEEYMGAEAVKSWTSSMFKEWDEKVRREKTSSRRARAAQCGGVFESPEYVHLLKVFLEDLDKQQQTNSKASRRQEIIKIRAELEIKT

SEQ ID NO: 11144 - protein, 221 aa, Homo sapiens
AEATALENPLEESRPHEDARINGSKKKKSKDKKRKREEDEETQFDIVGIWWTVINFGGISGTIAIEMDEGTYIHALDNGLFTLGAPHKERIALKPGYGKYLSINSDELVVGRSKAIGPREQWEPVFQNGACAAGFTVIGSEKQSECSLLRESRAKYHGCTHGQISSSLKQHPRWMYSHQEDLKVWSLVEKKVTFEHIYLLKRNNSHHSIAEAMYGRLSNYI

SEQ ID NO: 11145 - protein, 57 aa, Homo sapiens
GGARYHFFFFFFFFDGACSVTQAGVQWPILGSLQPPPPRFKQFSCLSLPSSWDYRRD

SEQ ID NO: 11146 - protein, 409 aa, Homo sapiens
RDSSSSTLSHKSAKCACGFFPSTHKSGTFRFTSVRCLKYKSAKSFLHIGYREAAVWCCQRLVPCTRRTQESSLDFATNLQHSAWSRLCRRGASRTSSAARSRSRSPAVEGCNRSPGAPQPAPRARRRPSRGAPGRAMVKVAFNSALAQKEAKKDEPKSGEEALIIPPDAVAVDCKDPDDVVPVGQRRAWCWCMCFGLAFMLAGVILGGAYLYKYFALQPDDVYYCGIKYIKDDVILNESPSADAPAALYQTIEENIKIFEERRSLNFISVPVPEFADSDPAKIVQDFNQETYRPYLDFNLDKCYVIPLNTSMCYATPKTLLELLINIKAGNLFALSPYLDSMRHMGYLLDRIENIDHPGFFIYRLCHDKETYKLQRRETIKGIQKREASNCFAIRHFENKFAVETLICS

SEQ ID NO: 11147 - protein, 171 aa, Homo sapiens
  DOMAIN (81)..(101): SYNAPTOBREVIN SIGNATURE domain identified by eMATRIX, accession number PR00219A, p-value=3.500e-24, raw score of 8.98
  DOMAIN (65)..(158): Synaptobrevin domain identified by PFam, accession name synaptobrevin, E-value=1.2e-27, PFam score of 105.3
QAGKLRPGGLDSRSRSSSAAGLDRDQGLHRVAFLPKRRTGGTRMDRSATAATAPPAAPAGEGGPPAPPPNLTSNRRLQQTQAQVDDVVDIMRVNVDKVLERDQKQSELDDRCADALQAGASQFETSAAKLKRKYWWKNLKMMIILGVICAIILIIIIVYFQHLNPRGVCPA

SEQ ID NO: 11148 - protein, 182 aa, Homo sapiens
SSERCHQQVFIPMPALPPGFSQAGSCVPTGSSLVLCLLAASLLLFVPTLALLTGATTCWCLHNKRLAVRRPLAWAGAFGGLVSTRLIHGRTSFYFNSLPLQTNSSTCQNHSWDSGGRGDLPWPLAAPRRVGLDLCSCQAHTCQQGADWIHALLCLMGVTGVPTALPAKHLEQNTSPFVVDAE

SEQ ID NO: 11149 - protein, 50 aa, Homo sapiens
GAISAHCNLRLPGSSDSPDSASNLIQMSLLRVLLLEMVLTLRTTRKPSEI

SEQ ID NO: 11150 - protein, 115 aa, Homo sapiens
WWEVKGMSHGQKNKQEGGAIHFRACVCVMESHSVTRLECSGAISAHCNLRLQGSSNSPDSASRVAGTTSTRHEAQLIFVFLAETGFHHVGQAALELLTSSDPPTSASQSADMLYK

SEQ ID NO: 11151 - protein, 102 aa, Homo sapiens
  DOMAIN (44)..(92): G-protein gamma subunit profile domain identified by eMATRIX, accession number BL50058, p-value=9.182e-37, raw score of 27.23
  DOMAIN (41)..(102): GGL domain identified by PFam, accession name G-gamma, E- value=7.2e-29, PFam score of 104.4
RLTAAATASLCPLPRPVTRLPLSRGSKMKEGMSNNSTTSISKPRKAVEQLKMEACMDRVKVSQAAADLLAYCEAHVREDPLIIPVPASENPFREKKFFCTIL

SEQ ID NO: 11152 - protein, 149 aa, Homo sapiens
  DOMAIN (77)..(149): Immunoglobulin domain identified by PFam, accession name ig, E-value=0.0039, PFam score of 15.1
FPVCWNSEAAAAEDPSPDPGLRSQNHEPGHQHRSPANRWVGGPCAASPSSLKEALLVPVLQVSRGQKVTSLTACLVDQSLRLDCRHENTSSSPIQYEFSLTRETKKHVLFGTVGVPEHTYRSRTNFTSKYNMKVLYLSAFTSKDEGTYT

SEQ ID NO: 11153 - protein, 462 aa, Homo sapiens
  DOMAIN (72)..(101): INTERLEUKIN-2 SIGNATURE domain identified by eMATRIX, accession number PR00265A, p-value=5.398e-09, raw score of 15.44
  DOMAIN (332)..(407): Immunoglobulin domain identified by PFam, accession name ig, E-value=8.7e-07, PFam score of 26.9
LYQTASCPEYLVDYLENYGRKGSASQVPSQAPPSRVPEIISPTYRPIGRYTLWETGKGQAPGPSRSSSPGRDGMQLLACVSLGERSVLPLALVSSSEKRADVCSACIAGLGFSICTLEMITVPVLEDGTWLCAPTALTIRQIHVSVSIDDILPRGKVFREDVIIIYKAKHRGEVSSPYHYLQLSPILKAASVHSAQNVVDTLLSELQTGTDPRILPPGSPTGGTYLPLLGGWTSRTGHKHGAAVHKNTLHTKLLLLGDGGMASAIQDCFSYLFSTSFSDMKLNPDPGLRSQNHEPGHQHRSPANSLKEALLVPVLQVSRGQKVTSLTACLVDQSLRLDCRHENTSSSPIQYEFSLTRETKKHVLFGTVGVPEHTYRSRTNFTSKYNMKVLYLSAFTSKDEGTYTCALHHSGHSPPISSQNVTVLRDKLVKCEGISLLAQNTSWLLLLLLSLSLLQATDFMSL

SEQ ID NO: 11154 - protein, 105 aa, Homo sapiens
FFFFLRRSLALSPRLECSGVISAHCKLRLPGSRRFSCLSLSHSWDYRRPPPRPANFLYFLVEKGFHCVSQDGLHLLTSAIPPTSAFPKCWDYRCDSMNFLMVSKD

SEQ ID NO: 11155 - protein, 58 aa, Homo sapiens
  misc_feature (1)...(58): Xaa = X or * as defined in Table 2
DCTSRPSLCPLSARCDVHGLSPGPELVRXGLIVIEDALPKSHSGGRGEVRQPWDFCGA

SEQ ID NO: 11156 - protein, 166 aa, Homo sapiens
  DOMAIN (107)..(125): Immunoglobulins and major histocompatibility complex proteins domain identified by eMATRIX, accession number BL00290B, p-value= 9.625e-09, raw score of 13.17
  DOMAIN (35)..(112): Immunoglobulin domain identified by PFam, accession name ig, E-value=0.0018, PFam score of 16.2
DPRTMNLAISIALLLTVLQVSRGQKVTSLTACLVDQSLRLDCRHENTSAVSPIQYEFSLTRETKKHVLFGTVGVPEHTYRSRTNFTSKYNMKVLYLSAFTSKDEGTYTCALHHSGHSPPISSQNVPVFRDHGVKCEGISLLAQNASWLLLLLLSLSLLQATDFMSL

SEQ ID NO: 11157 - protein, 49 aa, Homo sapiens
YSTDELPNIKISTSGRLQWLMSIIPALWEAEDQAGRSFEFRNLRLVWTT

SEQ ID NO: 11158 - protein, 238 aa, Homo sapiens
PLPPAATPCPKKQLGSQAWACRAARGAEQGVWGWRKHPAPSRGRVDKGSTKQKDPSPAHTTSTLNYQMHSCSHKRRHTHTHTHTHTHTHTHTHTRQHNIPGGPSPDQEEAGQVVEKKAANPSHNPTLQDRRVSSILSCCKRKLEAPSPEQISMVGPRGSNLWFPHWQRRQEPAKCSFGLKEQWGGDFSRMNRLMGPGVNPSTSFPWSRKLLHGKDVRCWLRHRAKCLSARCPRIWRVW

SEQ ID NO: 11159 - protein, 66 aa, Homo sapiens
DRVWLLPRLEYSGMVSAHCNTHLLGSSQSPTSASQAAGTTGAHHYVPQLVYIYIYILGFLVETRFR

SEQ ID NO: 11160 - protein, 42 aa, Homo sapiens
  misc_feature (1)...(42): Xaa = X or * as defined in Table 2
MILEFHXXXXXXXGGGRFKEPLGGPNLPGAGKVLFFSLWGAD

SEQ ID NO: 11161 - protein, 115 aa, Homo sapiens
PFKFILITQVIRDPLFSSEPYLGEKANHPPGFHHVKGQQASHVCKTHPAPSCPPPDCCLPCPSLGPAPHFRGCCEMEFPGKNFRCLDPFYLDNIFRFFCSLVTYPGGKEIARTFF

SEQ ID NO: 11162 - protein, 84 aa, Homo sapiens
TKWAGSIVYLSFSFLHMFMSFLLLVSTFLALCMLILVVLFLLKLPPKLFSELPLLKLTFLPCELLHLHLLFQDLAYFFFNGLRK

SEQ ID NO: 11163 - protein, 97 aa, Homo sapiens
ATAARPCPGLGRRAGESRGPGHIGVRPGSTLCQIIATCHMSVNDGGCKYVLCRWEKRLWPAKVLARTATSTKNKRRKEYFLAVQILSLEEKLSVVLF

SEQ ID NO: 11164 - protein, 646 aa, Homo sapiens
  DOMAIN (451)..(468): PWWP domain proteins domain identified by eMATRIX, accession number PF00855, p-value=7.000e-10, raw score of 13.75
CPGLGRRAGESRGPGHIGVRPGSTLCQIIATCHMSVNDGGCKYVLCRWEKRLWPAKVLARTATSTKNKRRKEYFLAVQILSLEEKIKVKSTEVEILEKSQIEAIASSLASQNEVPAAPPLEELAYRRSLRVALDVLSEGSIWSQESSAGTGRADRSLRGKPMEHVSSPCDSNSSSLPRGDVLGSSRPHRRRPCVQQSLSSSFTCEKDPECKVDHKKGLRKSENPRGPLVLPAGGGAQDESGSRIHHKNWTLASKRGRNSAQKASLCLNGSSLSEDDTERDMGSKGGSWAAPSLPSGVREDDPCANAEGHDPGLPLGSLTAPPAPEPSACSEPGECPAKKRPRLDGSQRPPAVQLEPMAAGAAPSPGPGPGPRESVTPRSTARLGPPPSHASADATRCLPCPDSQKLEKECQSSEESMGSNSMRSILEEDEEDEEPPRVLLYHEPRSFEVGMLVWHKHKKYPFWPAVVRSVRQRDKKASVLYIEGHMNPKMKGFTVSLKSLKHFDCKEKQTLLNQAREDFNQDIGWCVSLITDYRVRLGTWGAGEGWSWAAGVQPLKTPWTGWAGAAWRRGIFPWAWGIPCGWAGVLAWPDYFLNRDAGPAPGTHFLGLLLGLHSALSPPPPAGCGSFAGSFLEYYAADISKSTGCI

SEQ ID NO: 11165 - protein, 154 aa, Homo sapiens
  misc_feature (1)...(154): Xaa = X or * as defined in Table 2
LIGYILFCFFFFFFFFLRQSLVLLPGLECSGVILAHCNPRLPGFKXFSCLSLPSSWNYRHAPARPVSFVFLAEMGFHHIGQAGLKLLTSVIPPTSAFRKCWDYRREPPRPTAFFVLNKFTVLGSNSGFXTXDHRINHFMRLYCNYTLEYSGSHL

SEQ ID NO: 11166 - protein, 906 aa, Homo sapiens
  DOMAIN (491)..(508): PWWP domain proteins domain identified by eMATRIX, accession number PF00855, p-value=8.313e-09, raw score of 13.75
MERPLRGSRHPRLFPVPPGVLGPSQGHIGVRPGSTLCQIIATCHMSVNDGGCKYVLCRWEKRLWPAKVTAIIRVTSGLRNDFRVTKTSVTGPSILKYLVFEPVTLNQRLTFKRQITDDQAAHCSAPIKVKSTEVEILEKSQIEAIASSLASQNEVPAAPLEELAYRRSLRVALDVLSEGSIWSQESSAGTGRDNRSLRGKPMEHVSSPCDSNSSSLPRGDVLGSSRPHRRRPCVQQSLSSSFTCEKDPECKVDHKKGLRKSENPRGPLVLPAGGGAQDESGSRIHHKNWTLASKRGGNSAQKASLCLNGSSLSEDDTERDMGSKGGSWAAPSLPSGVREDDPCANAEGHDPGLPLGSLTAPPAPEPSACSEPGECPAKKRPRLDGSQRPPAVQLEPMAAGAAPSPGPGPGPRESVTPRSTARLGPPPSHASADATRCLPCPDSQKLEKECQSSEESMGSNSMRSILEEDEEDEEPPRVLLYHEPRSFEVGMLVWHKHKKYPFWPAVSWDESTRGWISRLKAAFRTIALHIPKSNAQNRCHLTSPSLRVPGAHLRSDQPKPSGPRCPPAFRPAQAIGSPVPTCVQISPSHRVPGAHLRSDQPKPSGPRCPPFEQLRAQTCAWCVSHLPEGPCARRLPEPPLSGRNQAREDFNQDIGWCVSLITDYRVRLGCGSFAGSFLEYYAADITSRACPGALIPWATSSVSLLWLVAAHIRCCEECRPGASFAGYPVRKSIQQDVLGTKLPQLSKGSPEEPVVGCPLGQRQPCRKMLPDRSRAARDRANQKLVEYIVKAKGAESHLRAILKSRKPSRWLQTFLSSSQYVTCVETYLEDEGQLDLVVKYLQGVYQEVGAKVLQRTNGDRIRFILDVLLPEAIICAISAVDEVDYKTAEEKYIKGPSLKLPGKRNI

SEQ ID NO: 11167 - protein, 59 aa, Homo sapiens
PRVRQKTVGLFILEIPPFVLDCKLSFFLFRPFTTRTENVCKSSVTVQKENNFLCIASKR

SEQ ID NO: 11168 - protein, 337 aa, Homo sapiens
  DOMAIN (166)..(177): Zinc finger C-x8-C-x5-C-x3-H type (and similar) domain identified by eMATRIX, accession number PF00642, p-value=3.700e-16, raw score of 11.59
  DOMAIN (113)..(181): Zinc finger C-x8-C-x5-C-x3-H type domain identified by PFam, accession name zf-CCCH, E-value=8.7e-27, PFam score of 98.9
WTSWWMSSVLTILLFSLQGNKMLNYSAPSAGGCLLDRKAVGTPAGGGFPRRHSVTLPSSKFHQNQLLSSLKGEPAPALSSRDSRFRDRSFSEGGERLLPTQKQPGGGQVNSSRYKTELCRPFEENGACKYGDKCQFAHGIHELRSLTRHPKYKTELCRTFHTIGFCPYGPRCHFIHNAEERRALAGARDLSADRPRLQHSFSFAGFPSAAATAAATGLLDSPTSITPPPILSADDLLGSPTLPDGTNNPFAFSSQELASLFAPSMGLPGGGSPTTFLFRPMSESPHMFDSPPSPQDSLSDQEGYLSSSSSSHSGSDSPTLDNSRRLPIFSRLSISDD

SEQ ID NO: 11169 - protein, 49 aa, Homo sapiens
NFISTSPALKISMLGKAKLNILAMVFVTMLVSGMVPCPPPPSPPTPLKI

SEQ ID NO: 11170 - protein, 94 aa, Homo sapiens
GLPAPLPPPPPRSLPFPAPGLRSQRFSTSAPPRHARPPPVARARAAPPHPQASGRKSQVSAPLVERAPLRAPGLTATAVVTVLGDPACAFPLEM

SEQ ID NO: 11171 - protein, 109 aa, Homo sapiens
KVFFCFYRIYVCICVCVCVCVCTLQTLCYSIANMLTSSQCLQSCGSQSWCQMHIKSSKAIMTIPCKFISRKPWEGDCSSLEPHGVSAFDIWVPQLCIKKVLNHFSPRKN

SEQ ID NO: 11172 - protein, 549 aa, Homo sapiens
  DOMAIN (239)..(281): Fork head domain proteins domain identified by eMATRIX, accession number BL00657A, p-value=4.375e-36, raw score of 19.39
  DOMAIN (127)..(334): Fork head domain identified by PFam, accession name Fork_head, E-value=4.8e-65, PFam score of 229.5
FLRGGCCFCYMTCQRPSLRPTALLPERSVPPLPPAAPPRPVRHPPVAAPPARRCPAPAPPPPFPPDDWVMLDMGDRKEVKMIPKSSFSINSLVPEGLQNDNHHASHGHHNSHHPQHHHHHHHHHHHPPPPAPQPPPPRAAQQQQPPPPPLAPQAGGAAQSNDEKGPQLLLLPPTDHHRPPSGAKAGGCCRPGELGPVGPDEKEKGAGAGGEEKKGAGEGGKDGEGGKEGEKKNGKYEKPPPFSYNALIMMAIRQSPEKRLTLNGIYEFIMKNFPYYRENKQGWHNSIRDNLSLNKCFVKVPRHYDDPGKGNYWMLDPSSDDVFIGGTTGKLRRRSTTSRAKLAFKRGAALTSTGLTFMDRAGSLYWPMSPFLSLHHPRASSTLSYNGTTSAYPSHPMPYSSVLTQNSLGNNHSFSTANGLEAWDRLVNGEIPYTATHHLTAAALAASVPCGLSVPCSGTYSLNPCSVNLLAGQTSYFFPHVPHPSMTSQSSTFMSARAASSSTSPQAPSTLPCESLRPSLPSFTTGLSGGLSDYFTHQNQGSSSNPLIH

SEQ ID NO: 11173 - protein, 184 aa, Homo sapiens
  DOMAIN (47)..(56): Zinc finger C3HC4 type (RING finger), proteins. domain identified by eMATRIX, accession number BL00518, p-value=6.571e-10, raw score of 12.23
  DOMAIN (32)..(75): Zinc finger, C3HC4 type (RING finger) domain identified by PFam, accession name zf-C3HC4, E-value=4.7e-13, PFam score of 46.6
  misc_feature (1)...(184): Xaa = X or * as defined in Table 2
TRGTSAARTGRSSGIASMASGILVNVKEEVTCPICLELLTQPLSLDCGHSFCQACLTANHKKSMLDKGESSCPVCRISYQPENIRPNRHVANIVEKLREVKLSPEGQKVDHCARHGEKLSIFCQEDGEGSFCWVCXAVFREHRGSPHVSSQRRFAREYQVKLQAALEMLRQKQQEAEELEADIR

SEQ ID NO: 11174 - protein, 169 aa, Homo sapiens
  DOMAIN (28)..(48): HIGH MOBILITY GROUP (HMG1/HMG2) PROTEIN SIGNATURE domain identified by eMATRIX, accession number PR00886D, p-value=9.194e- 09, raw score of 15.72
  DOMAIN (1)..(61): HMG (high mobility group) box domain identified by PFam, accession name HMG_box, E-value=2.6e-06, PFam score of 31.9
MSAYQVFCKEYRVTIVADHPDFGELSKKLAEVWKQLPEKDKLIWKQKAQYLQHKQNKAEATTVKRKASSSEGSMKVKGSDHIPPLLFSKACEFCFLAKKLGKKLAVLEVDLDSQGMVAVSGSLSVLLDSIICALGPLACLTTQLPELNGCPKQVLSNTLDNIAYIMPGL

SEQ ID NO: 11175 - protein, 381 aa, Homo sapiens
FLLWRYFVFGIVTEEKEKVQPTVYLIQLLDLLKAITSPHLEAGSKPSKKTGEKSSGSSSHSESKKEHHRKKVSGSSGELPLEDGVSHKSKKMKPLYVNTETLTLREPDGLKMKLILSPKEKGSSSVDEESFQYPSQQATVKKSSKKSARDEQGALLLGHELQSFLKTARKKHKSSSDAHSSPGPLKGLLGLDASQFRKSPHSANLDLSGLEPILVESDSSSGGELEAGELVIDDSSREIKKKKKSKKSKKKKDKEKHKEKRHSKSKRSLGLSAVPVGEVTVTSGPPPSIPYAGAAAPPLPLPGLHTDGHSEKKKKKEEKDKERERGEKMGPSSWKKISSGLPLILHDGPWKNCFPRNRYPVPKRLRTADLVGLYLGSQKHK

SEQ ID NO: 11176 - protein, 542 aa, Homo sapiens
  DOMAIN (331)..(381): HMG1/2 proteins domain identified by eMATRIX, accession number BL00353B, p-value=1.462e-11, raw score of 11.47
  DOMAIN (350)..(415): HMG (high mobility group) box domain identified by PFam, accession name HMG_box, E-value=8.6e-13, PFam score of 55.9
RRREVEGWYFGGFSHRRTVCICDTPDISSLESSQKKKKKSSPQSTDTAMDLLKAITSPLAAGSKPSKKTGEKSSGSFKAISGELKREHHRKKVSGSSGELPLEDGGSHKSKKMKPLYVNTETLTLREPDGLKMKLILSPKEKGSSSVDEESFQYPSQQATVKKSSKKSARDEQGALLLGHELQSFLKTARKKHKSSSDAHSSPGPEGCGSDASQFAESHSANLDLSGLEPILVESDSSSGGELEAGELVIDDSYREIKKKKKSKKSKKKKDKEKHKEKRHSKSKRSLGLSAVPVGEVTVTSGPPPSIPYAGAAAPPLPLPGLHTDGHSEKKKKKEEKDKERERGEKPKKKNMSAYQVFCKEYRVTIVADHPGIDFGELSKKLAEVWKQLPEKDKLIWKQKAQYLQHKQNKAEATTVKRKASSSEGSMKVKASSVGVLSPQKKSPPTTMLLPASPAKAPETEPIDVAAHLQLLGESLSLIGHRLQETEGMVAVSGSLSVLLDSIICALGPLACLTTQLPELNGCPKQVLSNTLDNIAYIMPGL

SEQ ID NO: 11177 - protein, 71 aa, Homo sapiens
PFMICLVHFCAPGNPPSARPRPSPSPRCHPCAPQEGKMTHPQFRVMPAPSCYNWLLENVPFIIQNSGVRIS

SEQ ID NO: 11178 - protein, 132 aa, Homo sapiens
GGGSGPRAPSATLLDTGESVAAVASGEDKGIAASAAAAAVFACSCSPDPQSSTMNPVYSPVQPGAPYGNPKNMAYTGYPTAYPAAAPAYNPSLYPTNSPSYAPATLVMKQAWPQNSSSCGTEGTFHLPVDTG

SEQ ID NO: 11179 - protein, 144 aa, Homo sapiens
WTAHEFPGRRFRGGSGPRAPSATLLDTGESVAAVASGEDKGIAASAAAAAVFACSCSPDPQSSTMNPVYSPVQPGAPYGNPKNMAYTGYPTAYPAAAPAYNPSLYPTNSPSYALFLHGLQRRGLKTGQRLHGGGWQEQKLQMKK

SEQ ID NO: 11180 - protein, 44 aa, Homo sapiens
MVPGPSLQNSWQASFNIPWPALPKPDLGPSPSVSPVDIFCGACC

SEQ ID NO: 11181 - protein, 84 aa, Homo sapiens
  misc_feature (1)...(84): Xaa = X or * as defined in Table 2
SSKQNKNPKESKTTKQNQIYTSYTQARPWGFPIFTPGLCFENTYKFFDQTTWKTLVKSSSSSSSSSSSPILFLFKMXVPIKFKN

SEQ ID NO: 11182 - protein, 93 aa, Homo sapiens
MDAAGGYPTAYPAAAPAYNPSLYPTNSPSYAPGLGSPQVAQQQFLKHAGTCLMVQKSWVGDTHEPSLGQQQRIMALKGVSQPNLAAEFKQTNE

SEQ ID NO: 11183 - protein, 297 aa, Homo sapiens
GGGSGPRAPSATLLDTGESVAAVASGEDKGIAASAAAAAVFACSCSPDPQSSTMNPVYSPVQPGAPYGNPKNMAYTGYPTAYPAAAPAYNPSLYPTNSPSYAPEFQFLHSAYATLLMKQAWPQNSSSCGTEGTFHLPVDTGTENRTYQASSAAFRYTAGTPYKVPPTQSNTAPPPYSPSPNPYQTAMYPIRSAYPQQNLYAQGAYYTQPVYAAQPHVIHHTTVVQPNSIPSAIYPAPVAAPRTNGVAMGMVAGTTMAMSAGTLLTTPQHTAIGAHPVSMPTYRAQGTPAYSYVPPHW

SEQ ID NO: 11184 - protein, 479 aa, Homo sapiens
  misc_feature (1)...(479): Xaa = X or * as defined in Table 2
TRGPRGPADSCRKAWSEKAWQRGPWSWCPAAGASGGCGPLHPWLWPPEPWVERATPTXGPCSRTPAPGSPLPGFLRPGLPAAVCRPPGSPCSETVLFXEAEPTPXAPVRIGGTFQPCAVLLPARMKVVQSSTVRXVTVTRLPVQKVEVAGGWPGSHEKTLPAAPAWGLDRKPLQAPRSQLKPPNPQGTAESGQRWAHRYKCCFVSLTPCSSQLPVPXDLASKGXPSHTXILGSFXDLCLPAXPMLQGPCPQPLSAPXVFLFPSLSXVGALIGPFLARPFSRGQLPXAWATPPWPSXPLAKSPPDVACSLVPGPSFSPSHPSAPVVEPHLXAPGALNVLSPLDLMCIPSPASYVAAKAPQAVNGGSCHTSLPELTXPPATSCIGILRAGPCSLMGPPRPVKPWXRSLACLLGNSQCLTPQPKTGSVPYGSPAVAWVPERLPPPGSPPPAPIKVLPLMQACVDHVFPWPEPPPATGGQLPF

SEQ ID NO: 11185 - protein, 166 aa, Homo sapiens
RHEGGMWRAGSMSAELGVGCALRAVNERVQQAVARRPRDLPSPSQPRLVAVSAKTKPADMVIEAYGHGQRTFGENYVQELLEKASNPKILSLCPEIKWHFIGHLQKQNVNKLMGKSEFLIKRENIMPRTELNSPFSGVIYTWETYPTSMFIIIWWSFRKIIKNCSP

SEQ ID NO: 11186 - protein, 333 aa, Homo sapiens
IPILIMKLLCCHKSSGDPPYLHLFAKSKHSTLPFSLGLGVGPRGMWRAGSMSAELGVGCALRAVNERVQQAVARRPRGDLPAIQPRLVAVSKTKPADMVIEAYGHGQRTFGENYVQELLEKASNPKILSLCPEIKWHFIGHLQKQNVNKLMAVPNLFMLETVGFCECLADKVNSSWQRKGSPERLKVMGPGFNTSREEIYLFSVSLLEGKHGLPPSETIAIVEHINAKCPNLEFVGLMTLGSFGHDLSQGPNPDFQLLLSLPEEICGKKLNIPAEQVELIMGMSADFQHAVEVGSTNVRIGSTIFGERDYSKKPTPDKCAADVKAPLEVAQEH

SEQ ID NO: 11187 - protein, 88 aa, Homo sapiens
AGNRLRFQLELEFVQCLANPNYLNWYPQCLHMLELLQYEHFRKELVNAQCAKFIDEQQILHWQHYSRKRMRLQQALAKQQQQNNTSGK

SEQ ID NO: 11188 - protein, 329 aa, Homo sapiens
MIGPPGSWLAGWQLEAFLSWLRALAPWWPLGSSISSGRFFVLAGGRLGRGVGLSAQCRDVSTLRDEALTWREVVSVRCEEDSTCREDASRMRGSRFPEGEREGPSLRRWEVSTRRDDVSTRQKRGKLRYCHSRERHNTMTWKHHGPSKAKTLDSCPSGAPTARAPPPRYFGASAGGAIPGLVGDGRSRPAPYPTVPRDRKREPWFPELRPRLWAFALSGWWRFGVFVCYGRCCRYGDRGYFKDKAFVNYLKYLLYWKDPEYAKYLKYPQCLHMLELLQYEHFRKELVNAQCAKFIDEQQILHWQHYSRKRMRLQQALAEQQQQNNTSGK

SEQ ID NO: 11189 - protein, 161 aa, Homo sapiens
RGFRNFARVSGLLLCQAGGVLVSSFVMAAAVAMETDDAGNRLRFQLELEFVQCYANHNTLIFLPQRGYFKDKAFVNYLKYLLYWKDPEYAKYLKYPQCLHMLGAAPNMEHFRKEAGWNAQCAKFIGWNRQVSTLGKHYSRKRMRLQQALAEQQQQNNTSGK

SEQ ID NO: 11190 - protein, 265 aa, Homo sapiens
EKGRARGRERRRKMQLTRCCFVFLVQGSLYLVICGQDDGPPGSEDPERDDHEGQPRPRVPRKRGHISPKSRPMANSTLLGLLAPPGEAWGILGQPPNRPNHSPPPSAKGKKIFGWGDFYSNIKTVALNLLVTGKIVDHGNGTFSVHFQHNATGQGNISISLVPPSKAVEFHQEQQIFIEAKASKIFNCRMEWEKVERGRRTSLFTHDPAKICSRDHAQSSSTWSCSQPFKVVCVYIAFYSTDYRLVQKVCPDYNYHSDTPYYPSG

SEQ ID NO: 11191 - protein, 168 aa, Homo sapiens
  misc_feature (1)...(168): Xaa = X or * as defined in Table 2
IILKTGSSLCHPRLECSGVILVHRNLRLPGSSNSPASGSPVAXITGARHHDRLIFVFLVEMGFCYVGQAGLELLTSSDPPTSASQSAGVTGVSHCARPSFALXFXKSAXYNLELCLFYHHXYSKCIIFHFLFLDYNCQNLITINIESSLIFSILLISTFYCYLAEIPR

SEQ ID NO: 11192 - protein, 122 aa, Homo sapiens
  misc_feature (1)...(122): Xaa = X or * as defined in Table 2
MRARNLMTKLTVISRKEELQQEAAAHREVQSLPPGEMEERSSSKTCPQVCDGRILSCMIKVPPVGREKHXRPRGRSHXHEAGCGPFTPPKVDHHEHLPPRRVEAGSRQQKSTTEPFPQAAGW

SEQ ID NO: 11193 - protein, 94 aa, Homo sapiens
YLASLEIPQSKVPESRPSHQVPSSQSLDSETPPSNRHRQPPVDRKCVCRLPLPPPPTFRPPKVDHHEHLPPRRVEAGSRQQKSTTEPFPQAAGC

SEQ ID NO: 11194 - protein, 75 aa, Homo sapiens
KSSWSRWAFGTVRSPCGRQHRDIGATDNSGRSGPAEQRPQSSASSAMSAAGGSRLTFHPRNLPPRTPTQDSAALT

SEQ ID NO: 11195 - protein, 101 aa, Homo sapiens
  misc_feature (1)...(101): Xaa = X or * as defined in Table 2
ENEILEVVQLGSRVCVFHFYHLHCCRHHCPENVHAGCFGDCLGHGRCSIQNCTFERXIXVGXNNVAATAVMFGLVFPLVLSLKYQVYFFKVLALMNFCSSS

SEQ ID NO: 11196 - protein, 429 aa, Homo sapiens
  DOMAIN (258)..(279): EGF-LIKE DOMAIN domain identified by eMATRIX, accession number DM00864A, p-value=4.857e-09, raw score of 15.21
  DOMAIN (261)..(416): EGF-like domain identified by PFam, accession name EGF, E- value=0.011, PFam score of 22.3
MYERVYVSTDIAIKLCCKLLNRQFDRLYKKHSTGSASGEGLKALPLIVEGEGEPVCAEITRQEREEGAVHLFGLTWQLQPVEGELYANGVSKGNRGTESMDTTYSPIGGKVSDKSEKKVFQKGRAIDTGEVDIGAQVMQTIPPGLFWRFQITIHHPIYLKFNISLAKDSLLGIYGRRNIPPTHTQFDFVKLMDGKQLVKQDSKGSDDTQHSPRNLILTSLQETGFIEYMDQGPWYLAFYNDGKKMEQVFVLTTAIEIMDDCSTNCNGNGECISGHCHCFPGFLGPDCARDSCPVLCGGNGEYEKGHCVCRHGWKGPECDVPEEQCIDPTCFGHGTCIMGVCICVPGYKGEICEEEDCLDPMCSNHGICVKGECHCSTGWGGVNCETPLPEQCSGHGTFLLDAGVCSCDPKWTGSDCSTEHKGGSSRLFL

SEQ ID NO: 11197 - protein, 1503 aa, Homo sapiens
  DOMAIN (191)..(220): Regulator of chromosome condensation (RCC1) proteins domain identified by eMATRIX, accession number BL00625A, p-value=7.239e- 09, raw score of 16.21
  DOMAIN (3)..(160): NHL repeat domain identified by PFam, accession name NHL, E- value=0.0007, PFam score of 26.3
VRLEWPTDLAVNPMDNSLYVLDNNIVLQISENRRVRIIAGRPIHCQVPGIDHFLVSKVAIHSTLESARAISVSHSGLLFIAETDERKVNRIQQVTTNGEIYIIAGAPTDCDCKIDPNCDCFSGDGGYAKDAKMKAPSSLAVSPDGTLYVADLGNVRIRTISRNQAHLNDMNIYEIASPADQELYQFTVNGTHLHTLNLITRDYVYNFTYNSEGDLGAITSSNGNSVHIRRDAGGMPLWLVVPGGQVYWLTISSNGVLKRVSAQGYNLALMTYPGNTGLLATKSNENGWTTVYEYDPEGHLTNATFPTGEVSSFHSDLEKLTKVELDTSNRENVLMSTNLTATSTIYILKQGGDTRHSKSTLTFVSGILWSTATVMVGPGENTQSTYRVNPDGSLRVTFASGMEIGLSSEPHILAGAVNPTLGKCNISLPGEHNANLIEWRQRKEQNKGNVSAFERRLRAHNRNLLSIDFDHITRTGKIYDDHRKFTLRILYDQTGRPILWSPVSRYNEVNITYSPSGLVTFIQRGTWNEKMEYDQSGKIISRTWADGKIWSYTYLEKSVMLLLHSQRRYIFEYDQPDCLLSVTMPSMVRHSLQTMLSVGYYRNIYTPPDSSTSFIQDYSRDGRLLQTLHLGTGRRVLYKYTKQARLSEVLYDTTQVTLTYEESSGVIKTIHLMHDGFICTIRYRQTGPLIGRQIFRFSEEGLVNARFDYSYNNFRVTSMQAVINETPLPIDLYRYVDVSGRTEQFGKFSVINYDLNQVITTTVMKHTKIFSANGQVIEVQYEILKAIAYWMTIQYDNVGRHGNMCIRVGVDANITRYFYEYDADGQLQTVSVNDKTQWRYSYDLNGNINLLSHGKSARLTPLRYDLRDRITRLGEIQYKMDEDGFLRQRGNDIFEYNSNGLLQKAYNKASGWTVQYYYDGLGRRVASKSSLGQHLQFFYADLTNPIRVTHLYNHTSSEITSLYYDLQGHLIAMELSSGEEYYVACDNTGTPLAVFSSRGQVIKEILYTPYGDIYHDTYPDFQVIIGFHGGLYDFLTKLVHLGQRDYDVVAGRWTTPNHHIWKQLNLLPKPFNLYSFENNYPVGKIQDVAKYTTDIRSWLELFGFQLHNVLPGFPKPELENLELTYELLRLQTKTQEWDPGKTILGIQCELQKQLRNFISLDQLPMTPRYNDGRCLEGGKQPRFAAVPSVFGKGIKFAIKDGIVTADIIGVANEDSRRLAAILNNAHYLENLHFTIEGRDTHYFIKLGSLEEDLVLIGNTGGRRILENGVNVTVSQMTSVLNGRTRRFADIQLQHGALCFNIRYGTTVEEEKNHVLEIARQRAVAQAWTKEQRRLQEGEEGIRAWTEGEKQQLLSTGRVQGYDGYFVLSVEQYLELSDSANNIHFMRQSEIGRRYLLQQYSSSQYQNLYWSVQAAITRYHRQGGLNNRNLFLTILETGKSKIKVLQIAAIQPSGKQELLAGFPADFAMIHSHCVHGLVDSWAGRGGELCKGDAAATAARHKSTT

SEQ ID NO: 11198 - protein, 228 aa, Homo sapiens
  DOMAIN (38)..(77): N-acetyltransferase domain identified by eMATRIX, accession number PF00797A, p-value=1.000e-40, raw score of 14.57
  DOMAIN (48)..(228): N-acetyltransferase domain identified by PFam, accession name Acetyltransf2, E-value=4.1e-104, PFam score of 359.3
IQARKKQQSVFWIKTEDQPTFNLLRKGIMDIEAYLERIGYKKSRNKLDLETLTDILQHQIRAVPFENLNIHCGDAMDLGLEAIFDQVVRRNRGGWCLQGNHLLYWALTTIGCETTMLGGYVYSTPAKKYSTGMIHLLLQVTIDGRNYIVDAGFGRSYQMWQPLELISGKDQPQVPCVFRLTEENGFWYLDQIRREQYIPNEEFLHSDLLEDSKYRKIYSFTLKPRTIE

SEQ ID NO: 11199 - protein, 90 aa, Homo sapiens
  misc_feature (1)...(90): Xaa = X or * as defined in Table 2
RAFWQYFKSLNMFMSFDPAILLIGIYPKEKSXIQKDTLCPEVSEILLMVVKNYNXYICHTRNDQAGLIYHLYSGIYLALKXVCEFFTLKG

SEQ ID NO: 11200 - protein, 2727 aa, Homo sapiens
  DOMAIN (751)..(799): Membrane attack complex components / perforin proteins domain identified by eMATRIX, accession number BL00279E, p-value=9.349e- 10, raw score of 37.11
  DOMAIN (534)..(797): EGF-like domain identified by PFam, accession name EGF, E- value=2.6e-12, PFam score of 54.3
SEMEQTDCKPYQPLPKVKHEMDLAYTSSSDESEDGRKPRQSYNSRETLHEYNQELRMNYNSQSRKRKEVEKSTQEMEFCETSHTLCSGYQTDMHSVSRHGYQLEMGSDVDTETEGAASPDHALRMWIRGMKSEHSSCLSSRANSALSLTDTDHERKSDGENGFKFSPVCCDMEAQAGSTQDVQSSPHNQFTFRPLPPPPPPPHACTCARKPPPAADSLQRRSMTTRSQPSPAAPAPPTSTQDSVHLHNSWVLNSNIPLETRHSLFKHGSGSSAIFSAASQNYPLTSNTVYSPPPRPLPRSTFSRPAFTFNKPYRCCNWKCTALSATAITVTLALLLAYVIAVHLFGLTWQLQPVEGELYANGVSKGNRGTESMDTTYSPIGGKVSDKSEKKVFQKGRAIDTGEVDIGAQVMQTIPPGLFWRFQITIHHPIYLKFNISLAKDSLLGIYGRRNIPPTHTQFDFVKLMDGKQLVKQDSKGSDDTQHSPRNLILTSLQETGFIEYMDQGPWYLAFYNDGKKMEQVFVLTTAIEIMDDCSTNCNGNGECISGHCHCFPGFLGPDCARDSCPVLCGGNGEYEKGHCVCRHGWKGPECDVPEEQCIDPTCFGHGTCIMGVCICVPGYKGEICEEEDCLDPMCSNHGICVKGECHCSTGWGGVNCETPLPVCQEQCSGHGTFLLDAGVCSCDPKWTGSDCSTELCTMECGSHGVCSRGICQCEEGWVGPTCEERSCHSHCTEHGQCKDGKCECSPGWEGDHCTIAHYLDAVRDGCPGLCFGNGRCTLDQNGWHCVCQVGWSGTGCNVVMEMLCGDNLDNDGDGLTDCVDPDCCQQSNCYISPLCQGSPDPLDLIQQSQTLFSQHTSRLFYDRIKFLIGKDSTHVIPPEVSFDSRRACVIRGQVVAIDGTPLVGVNVSFLHHSDYGFTISRQDGSFDLVAIGGISVILIFDRSPFLPEKRTLWLPWNQFIVVEKVTMQRVVSDPPSCDISNFISPNPIVLPSPLTSFGGSCPERGTIVPELQVVQEEIPIPSSFVRLSYLSSRTPGYKTLLRILLTHSTIPVGMIKVHLTVAVEGRLTQKWFPAAINLVYTFAWNKTDIYGQKVWGLAEALVSVGYEYETCPDFILWEQRTVVLQGFEMDASNLGDWSLNKHHILNPQSGIIHKGNGENMFISQQPPVISTIMGNGHQRSVACTNCNGPAHNNKLFAPVALASGPDGSVYVGDFNFVRRIFPSGNSVSILELSTSPAHKYYLAMDPVSESLYLSDTNTRKVYKLKSLVETKDLSKNFEVVAGTGDQCLPFDQSHCGDGGRASEASLNSPRGITVDRHGFIYFVDGTMIRKIDENAVITTVIGSNGLTSTQPLSCDSGMDITQVRLEWPTDLAVNPMDNSLYVLDNNIVLQISENRRVRIIAGRPIHCQVPGIDHFLVSKVAIHSTLESARAISVSHSGLLFIAETDERKVNRIQQVTTNGEIYIIAGAPTDCDCKIDPNCDCFSGDGGYAKDAKMKAPSSLAVSPDGTLYVADLGNVRIRTISRNQAHLNDMNIYEIASPADQELYQFTVNGTHLHTLNLITRDYVYNFTYNSEGDLGAITSSNGNSVHIRRDAGGMPLWLVVPGGQVYWLTISSNGVLKRVSAQGYNPALMTYPGNTGLLATKSNENGWTTVYEYDPEGHLTNATFPTGEVSSFHSDLEKLTKVELDTSNRENVLMSTNLTATSTIYILKQENTQSTYRVNPDGSLRVTFASGMEIGLSSEPHILAGAVNPTLGKCNISLPGEHNANLIEWRQRKEQNKGNVSAFERRLRAHNRNLLSIDFDHITRTGKIYDDHRKFTLRILYDQTGRPILWSPVSRYNEVNITYSPSGLVTFIQRGTWNEKMEYDQSGKIISRTWADGKIWSYTYLEKSVMLLLHSQRRYIFEYDQSDCLLSVTMPSMVRHSLQTMLSVGYYRNIYTPPDSSTSFIQDYSRDGRLLQTLHLGTGRRVLYKYTKQARLSEVLYDTTQVTLTYEESSGVIKTIHLMHDGFICTIRYRQTGPLIGRQIFRFSEEGLVNARFDYSYNNFRVTSMQAVINETPLPIDLYRYVDVSGRTEQFGKFSVINYDLNQVITTTVMKHTKIFSANGQVIEVQYEILKAIAYWMTIQYDNVGRHGNMCIRVGVDANITRYFYEYDADGQLQTVSVNDKTQWRYSYDLNGNINLLSHGKSARLTPLRYDLRDRITRLGEIQYKMDEDGFLRQRGNDIFEYNSNGLLQKAYNKASGWTVQYYYDGLGRRVASKSSLGQHLQFFYADLTNPIRVTHLYNHTSSEITSLYYDLQGHLIAMELSSGEEYYVACDNTGTPLAVFSSRGQVIKEILYTPYGDIYHDTYPDFQVIIGFHGGLYDFLTKLVHLGQRDYDVVAGRWTTPNHHIWKQLNLLPKPFNLYSFENNYPVGKIQDVAKYTTDIRSWLELFGFQLHNVLPGFPKPELENLELTYELLRLQTKTQEWDPGKTILGIQCELQKQLRNFISLDQLPMTPRYNDGRCLEGGKQPRFAAVPSVFGKGIKFAIKDGIVTADIIGVANEDSRRLAAILNNAHYLENLHFTIEGRDTHYFIKLGSLEEDLVLIGNTGGRRILENGVNVTVSQMTSVLNGRTRRFADIQLQHGALCFNIRYGTTVEEEKNHVLEIARQRAVAQAWTKEQRRLQEGEEGIRAWTEGEKQQLLSTGRVQGYDGYFVLSVEQYLELSDSANNIHFMRQSEIGRR

SEQ ID NO: 11201 - protein, 127 aa, Homo sapiens
LSLPLSPRLECSGTILARCNLHPSPPRSKRFSCLSLPSSWDYRRAPPNLAIFLLLLFLVEMGFHHVGQTGLELLASNYLPTSAFPKCWDYRHEPPCPADKTNFLSLWFIGYNIFLESEVNFFLPWDA

SEQ ID NO: 11202 - protein, 163 aa, Homo sapiens
VFTDMSGLRHEPKALRRELPEEAAAEEERRKIEVPSEIEVPREALEPSVPLMVSLEISLEAAEEEKSRISLIPPEERWAWPEVEAPEAPALPVVPELPEVPMEMPLVLPPELELLSLEAVHSPRRMAARVFYLLLVLSAQQILHVKQEKPYGRLLIQPGPRFH

SEQ ID NO: 11203 - protein, 30 aa, Homo sapiens
PPPKALRRELPEEAAAEEERRKIEVPSEIE

SEQ ID NO: 11204 - protein, 114 aa, Homo sapiens
  misc_feature (1)...(114): Xaa = X or * as defined in Table 2
WGGPGLKPLLMVLDPYRAVALELQANREPDFSSLVSPLSPRRMAARVFYLLLVSVCMCVCVCGAGTQRPEARTGTPPTCPLLASXPVLSAQQILHVKQEKPYGRLLIQPGPRFH

SEQ ID NO: 11205 - protein, 24 aa, Homo sapiens
KTRGTMFYYPNVLQRHTGCFATIW

SEQ ID NO: 11206 - protein, 554 aa, Homo sapiens
KTRGNMFYYPNVLQRHNGCFATIWLAATRGSRLVKREYLRVNVVKTCEEILNYVLVRVQPPQPGLPRPRFSLYLSAQLQIGVIRVYSQQCQYLVEDIQHILYRLHRAQLQMRIDMETELPSLLLPNHLAMMETLEDAPDPFFGMMSVDPRLPSPFDIPQIRHLLEAAIPERVEEIPPEVPTEPREPERIPVTVLPPEAITILEAEPLRMLEIEGERELPEVSRRELDLLIAEEEEAILLEIPRLPPPAPAEVEGIGEALGPEELRLTGWEPGALLMEVTPPEELRLPAPPSPERRPPVPPLLRRRRRRRLLFWDKETQISPEEFPRNNLQTRAHCWECPMVQPPERTIRGPAELFRTPTLSGWLPPELLGLWTHCAQPPPKALRRELPEEAAAEEERRKIEVPSEIEVPREALEPSVPLMVSLEISLEAAEEEKSRISLIPPEERWAWPEVEAPEAPALPVVPEIPEVPMEMPLVLPPELELLLNWKTVHRAVALELQANREPDFSSLVSPLSPRRMAARVFYLLLVLSAQQILHVKQEKPYGRLLIQPGPRFH

SEQ ID NO: 11207 - protein, 95 aa, Homo sapiens
SPEHPQLPGSLLRPPGAQIPSEWQVAEATALVHTLDGWSVVQTMVVSTKTPDRKLIFGKGNFEHLKKELEAAWGVEVFDRFTVVLHILRCNARTK

SEQ ID NO: 11208 - protein, 132 aa, Homo sapiens
  misc_feature (1)...(132): Xaa = X or * as defined in Table 2
RPPRRVVRGRHQPHGEPAVRSGAPVRVPGEDDAAQPSAAERVGPRAVPGAGFTVHQHHRGGLHRRRRLRQXRHQPHGEPAVRSGAPVRVPGEDDAAQPSAAERVGPRAVPGAGFTVHQHHRGGLHRRRRLRQ

SEQ ID NO: 11209 - protein, 578 aa, Homo sapiens
  DOMAIN (300)..(321): GTP1/OBG GTP-BINDING PROTEIN FAMILY SIGNATURE domain identified by eMATRIX, accession number PR00326A, p-value=1.514e- 09, raw score of 8.75
AGRRTPGAAALPRGPRPLGSAGSRAVLPRARASRCRPQEPRESGGAVGRREGPAGGRRTKTERKTTRRSRKMRTRTPRRSCCGESLCCRRGPKRVCLVHPDVKWGPGKSQMTRAEWQVAEATALVHTLDGWSVVHTMVVSTKTPDRKLIFGKGNFEHLTEKIRGSPDITCVFLNVERMAAPTKKELEAAWGVEGCLTAFTVVLQHLPACNARTKERARLQVALAGDARLHRSNLKRDVAHLYRGVGSRAYIMGSGESFHMQLQQRLLREKEAKIRKALDRLRKKRHLLRRQRTRREFPVISVVGYTNCGKTTLIKALTGDAAIQPRDQLFATLDVTAHAGTLPSRMTVLYVDTIGFLSQLPHGLIESFSATLEDVAHSDLILHVRDVSHPEAELQKCSVLSTLRGLRLPAPLLDSMVEVHNKVDLVPGYSPTEPNVVPVSALRGHGLQELKVELDAAVLKATGRQILTLRVRLAGAQLNWLYKEATVQEVDVIPEDGAADVRVIISNFPYGKFRKLFPRMNGRPQKACGVGASPALGELRRYPLCWGQLGVRCSRVLLVWFCTRLASQPFAGMYRACR

SEQ ID NO: 11210 - protein, 38 aa, Homo sapiens
  misc_feature (1)...(38): Xaa = X or * as defined in Table 2
IHQEKPPNIFSVKKRHYDXPGQHDPLASASQSAGITGV

SEQ ID NO: 11211 - protein, 112 aa, Homo sapiens
  DOMAIN (85)..(112): Zn-finger in Ran binding protein and others domain identified by PFam, accession name zf-RanBP, E-value=0.00071, PFam score of 26.3
  misc_feature (1)...(112): Xaa = X or * as defined in Table 2
XGEQLVRQDLDAGVSEHSGDWLDQDSVSDQFSVEFEVESLDSEDYSLSEEGQELSDEDDEVYQVTVYQAGESDTDSFEEDPEISLADYWKCTSCNEMNPPLPSHCNRCWAHX

SEQ ID NO: 11212 - protein, 41 aa, Homo sapiens
  misc_feature (1)...(41): Xaa = X or * as defined in Table 2
FFVLLVETGFHRVSQDGLDLLTSXSAHLGLPKCWDYRHEPP

SEQ ID NO: 11213 - protein, 41 aa, Homo sapiens; identical to SEQ ID NO: 11212
  misc_feature (1)...(41): Xaa = X or * as defined in Table 2

SEQ ID NO: 11214 - protein, 41 aa, Homo sapiens; identical to SEQ ID NO: 11212
  misc_feature (1)...(41): Xaa = X or * as defined in Table 2

SEQ ID NO: 11215 - protein, 250 aa, Homo sapiens
  DOMAIN (77)..(106): Zn-finger in Ran binding protein and others domain identified by PFam, accession name zf-RanBP, E-value=3.6e-08, PFam score of 40.6
  misc_feature (1)...(250): Xaa = X or * as defined in Table 2
DLDAGVSEHSGDWLDQDSVSDQFSVEFEVESLDSEDYSPSEGGQELSDEDDEVYQVTVYQAGESDTDSFEEDPEISLADYWKCTSCNEMNPPLPSHCNRCWALRENWLPEDTGKDKGEISEKAKLENSTQAEEGFDVPDCKKTIVNDSRESCVEENDDKITQASQSQESEDYSQPSTSSSIIYSSQEDVKEFEREETQDKEESVESSLPLNAIEPCVICQGSTXKWLHCPWQNRTSYGLLYMCKEAKEKE

SEQ ID NO: 11216 - protein, 129 aa, Homo sapiens
  misc_feature (1)...(129): Xaa = X or * as defined in Table 2
SSRRFVWRAKLLCERAQSGTVYEIXQCAHRHPRHRHPGCCRHRLGYAGTAGPLAGYRPFRQHRQSLWRAASAICVDAISMRTRSRSTVRPLWPPPSPARFATWSHYRLRDHGDHTRPVDLPTSQFTILL

SEQ ID NO: 11217 - protein, 60 aa, Homo sapiens
  misc_feature (1)...(60): Xaa = X or * as defined in Table 2
FFVLLVETGFHRVSQDGLDLLTSXSAHLGLPKCWDYRHEPLRPAGLFKHSPGLYSQPILT

SEQ ID NO: 11218 - protein, 41 aa, Homo sapiens; identical to SEQ ID NO: 11212
  misc_feature (1)...(41): Xaa = X or * as defined in Table 2

SEQ ID NO: 11219 - protein, 55 aa, Homo sapiens
  misc_feature (1)...(55): Xaa = X or * as defined in Table 2
FFFFFFFFFGFLVETGFHRVSQDSLDLLTSXSSRLGLPKCWDYRHEPPRPAEEGI

SEQ ID NO: 11220 - protein, 134 aa, Homo sapiens
  misc_feature (1)...(134): Xaa = X or * as defined in Table 2
QEVRYRKVETLRCLLFSSCLVPVCAASPVSRPGCRFLRSSLHWPTGRLVFRQRGETFLVPEKTVLRGVASAPAQKAAGRTPVPGRPRDARLRADARSXSCXRAARPRRGASGAVGARCGPRPGFPFLRSGGIFV

SEQ ID NO: 11221 - protein, 72 aa, Homo sapiens
  DOMAIN (12)..(40): !!!! PROTEIN ALU SUBFAMILY WARNING ENTRY NUCLEAR PHOSPHO domain identified by eMATRIX, accession number PD02454B, p-value= 6.205e-12, raw score of 11.61
  misc_feature (1)...(72): Xaa = X or * as defined in Table 2
IHQEKPPNIFSVKKRHYDXPGQYGKTLSLLKIQILAGYSGTCLKSQLLRRVGREVIQLALKIRAPIWKIECL

SEQ ID NO: 11222 - protein, 502 aa, Homo sapiens
  DOMAIN (423)..(453): Fibrinogen beta and gamma chains C-terminal domain proteins domain identified by eMATRIX, accession number BL00514G, p-value= 2.241e-34, raw score of 15.98
  DOMAIN (11)..(502): Fibrinogen beta and gamma chains, C-term domain identified by PFam, accession name fibrinogen_C, E-value=2.2e-106, PFam score of 366.8
  misc_feature (1)...(502): Xaa = X or * as defined in Table 2
YMLFLFLSTKGWTVIQNRQDGSVDFGRKWDPYKQGFGNVATNTDGKNYCGLPGNEQACKIKSFYLKWDFFXLKNIHCWKPVLGSXEEFPDKNVEAKDKGRKAVFSFPKFYFWXEILFCFSFREYWLGNDKISQLTRMGPTELLIEMEDWKGDKVKAHYGGFTVQNEANKYQISVNKYRGTAGNALMDGASHLMGENRDHDPFHNGHGSFQPPYDRDNDGWYVWHSLLLLXKSHXYHYSESLTIFLIATTSWALTVSHCPKLFMHHSKAFQLXGRHSYSHFTDEIXRDYVICPMSHNYPEIKLEFEHSYFLNNEHLDKYLYLYILKCVXKLSFSFPGFSDTKGCKSYYSSIKXQTQSLDGLPQRPSYLSFLLXGTGGLWCISVTLCIAPKGKTTVHTSVAVFYGXSAKRNLTTVVLFLITPNTFSFRLTSDPRKQCSKEDGGGWWYNRCHAANPNGRYYWGGQYTWDMAKHGTDDGVVWMNWKGSWYSMRKMSMKIRPFFPQQ

SEQ ID NO: 11223 - protein, 32 aa, Homo sapiens
  misc_feature (1)...(32): Xaa = X or * as defined in Table 2
GRGDKPYPSPGDSWFVQDXILVQLXICPQEPS

SEQ ID NO: 11224 - protein, 559 aa, Homo sapiens
  DOMAIN (145)..(178): Nuclear hormones receptors DNA-binding region proteins domain identified by eMATRIX, accession number BL00031A, p-value=7.158e- 33, raw score of 19.55
  DOMAIN (143)..(218): Zinc finger, C4 type (two domains) domain identified by PFam, accession name zf-C4, E-value=2.1e-52, PFam score of 178.5
QRGHWEEAVGGRRAGAFGVGAQGRAGGRGVEAGRMRLSKTLVDMDMADYSAALDPAYTTLEFENVQVLTMGNGPSSPHCLTVALLGAWHSDMMILLPLRLARLRHPLRHHWSISGGVDSSPQGDTSPSEGTNLNAPNSLGVSALCAICGDRATGKHYGASSCDGCKGFFRRSVRKNHMYSCRFSRQCVVDKDKRNQCRYCRLKKCFRAGMKKEAVQNERDRISTRRSSYEDSSLPSINALLQAEVLSRQITSPVSGINGDIRAKKIASIADVCESMKEQLLVLVEWAKYIPAFCELPLDDQVALLRAHAGEHLLLGATKRSMVFKDVLLLGNDYIVPRHCPELAEMSRVSIRILDELVLPFQELQIDDNEYAYLKAIIFFDPDAKGLSDPGKIKRLRSQVQVSLEDYINDRQYDSRGRFGELLLLLPTLQSITWQMIEQIQFIKLFGMAKIDNLLQEMLLGGSPSDAPHAHHPLHPHLMQEHMGTNVIVANTMPTHLSNGQMCEWPRPRGQAATPETPQPSPPGGSGSEPYKLLPGAVATIVKPLSAIPQPTITKQEVI

SEQ ID NO: 11225 - protein, 474 aa, Homo sapiens
  DOMAIN (70)..(103): Nuclear hormones receptors DNA-binding region proteins domain identified by eMATRIX, accession number BL00031A, p-value=7.158e- 33, raw score of 19.55
  DOMAIN (69)..(144): Zinc finger, C4 type (two domains) domain identified by PFam, accession name zf-C4, E-value=2.1e-52, PFam score of 178.5
GRWPPRGGRENALSKTLVDMDMADYSAALDPAYTTLEFENVQVLTMGNDTSPSEGTNLNAPNSLGVSALCAICGDRATGKHYGASSCDGCKGFFRRSVRKNHMYSCRFSRQCVVDKDKRNQCRYCRLKKCFRAGMKKEAVQNERDRISTRRSSYEDSSLPSINALLQAEVLSRQITSPVSGINGDIRAKKIASIADVCESMKEQLLVLVEWAKYIPAFCELPLDDQVALLRAHAGEHLLLGATKRSMVFKDVLLLGNDYIVPRHCPELAEMSRVSIRILDELVLPFQELQIDDNEYAYLKAIIFFDPDAKGLSDPGKIKRLRSQVQVSLEDYINDRQYDSRGRFGELLLLLPTLQSITWQMIEQIQFIKLFGMAKIDNLLQEMLLGGSPSDAPHAHHPLHPHLMQEHMGTNVIVANTMPTHLSNGQMSTPETPQPSPPGGSGSESYKLLPGAVATIVKPLSAIPQPTITKQEVI

SEQ ID NO: 11226 - protein, 612 aa, Homo sapiens
  DOMAIN (21)..(54): Nuclear hormones receptors DNA-binding region proteins domain identified by eMATRIX, accession number BL00031A, p-value=7.158e- 33, raw score of 19.55
  DOMAIN (19)..(94): Zinc finger, C4 type (two domains) domain identified by PFam, accession name zf-C4, E-value=2.1e-52, PFam score of 178.5
TSPSEGTNLNAPNSLGVSALCAICGDRATGKHYGASSCDGCKGFFRRSVRKNHMYSCRFSRQCVVDKDKRNQCRYCRLKKCFRAGMKKEAVQNERDRISTRRSSYEDSSLPSINALLQAEVLSRQITSPVSGINGDIRAKKIASIADVCESMKEQLLVLVEWAKYIPAFCELPLDDQVSSFMGSSFMMPISQFRQVALLRAHAGEHLLLGATKRSMVFKDVLLLGNDYIVPRHCPELAEMSRVSIRILDELVLPFQELQIDDNEYAYLKAIIFFDPDAKGLSDPGKIKRLRSQVQVSLEDYINDRQYDSRGRFGELLLLLPTLQSITWQMIEQIQFIKLFGMAKIDNLLQEMLLGGSPSDAPHAHHPLHPHLMQEHMGTNVIVANTMPTHLSNGQMCEWPRPRGQAGKTIPVTHPIAAGDSQAWALVWEKQSKSAYQINDGGDGCPCHGVQTEPCEAGSNCGTWGTLLLLLLLPPPLLPPSAVTLLSHPVFSNTTSPEAKEALETIPPVILGTCWTWVGTWVRIPEGLQPEKTNPGWRLQQELGVERKSIRKRQTIHQAFEKGRRGATVSWETNEDTSALDQIMDYVEKQWKQRRPQVAWAVVQVKDDGSMD

SEQ ID NO: 11227 - protein, 213 aa, Homo sapiens
  misc_feature (1)...(213): Xaa = X or * as defined in Table 2
VLIGCIPQVPPSISYSPLFWFSALGNVAEIFFCLCLGNHNSCWRTLVVEVPESLCPHCXRLLVXHKSGDIWVLTPQMLQLDPAALPCPPSSIVDAKGLSDPGKIKRLRSQVQVSLEDYINDRQYDSRGRFGELLLLLPTLQSITWQMIEQIQFIKLFGMAKIDNLLQEMLLGGPCQAQEGRGWSGDSPGDRPHTVSSPLSSLASPLCRFGQVA

SEQ ID NO: 11228 - protein, 493 aa, Homo sapiens
  DOMAIN (79)..(112): Nuclear hormones receptors DNA-binding region proteins domain identified by eMATRIX, accession number BL00031A, p-value=7.158e- 33, raw score of 19.55
  DOMAIN (78)..(153): Zinc finger, C4 type (two domains) domain identified by PFam, accession name zf-C4, E-value=2.1e-52, PFam score of 178.5
GFGVGAQGRAGGRRVEAGRMRLSKTLVDMDMADYSAALDPAYTTLEFENVQVLTMGNDTSPSEGTNLNAPNSLGVSALCAICGDRATGKHYGASSCDGCKGFFRRSVRKNHMYSCRFSRQCVVDKDKRNQCRYCRLKKCFRAGMKKEAVQNERDRISTRRSSYEDSSLPSINALLQAEVLSRQITSPVSGINGDIRAKKIASIADVCESMKEQLLVLVEWAKYIPAFCELPLDDQVALLRAHAGEHLLLGATKRSMVFKDVLLLGNDYIVPRHCPELAEMSRVSIRILDELVLPFQELQIDDNEYAYLKAIIFFDPDAKGLSDPGKIKRLRSQVQVSLEDYINDRQYDSRGRFGELLLLLPTLQSITWQMIEQIQFIKLFGMAKIDNLLQEMLLGGSPSDAPHAHHPLHPHLMQEHMGTNVIVANTMPTHLSNGQMCEWPRPRGQAATPETPQPSPPGGSGSESYKLLPGAVATIVKPLSAIPQPTITKQEVI

SEQ ID NO: 11229 - protein, 66 aa, Homo sapiens
  misc_feature (1)...(66): Xaa = X or * as defined in Table 2
ENPKQQENLWSQYFTLISTIXKKKSWLCIVAHACDSSTLGDXGGHIAXAQEFETSVGNIVKPPSLY

SEQ ID NO: 11230 - protein, 420 aa, Homo sapiens
  DOMAIN (355)..(368): PROTEIN ZINC-FINGER METAL-BINDI domain identified by eMATRIX, accession number PD00066, p-value=8.200e-16, raw score of 13.92
  DOMAIN (309)..(415): Zinc finger, C2H2 type domain identified by PFam, accession name zf-C2H2, E-value=7.2e-34, PFam score of 126.0
EPPFSTTFALHAFTFFSDQQNQVSDDDLDPSFTVSTSKASGPHGAFNGNCEAKLSVVPKVSGLERSQEQPPGPDPLLVPFPPKEPPPPPVPRPPVSPPAPLPATPSLPPPPQPQLQLRVSPFGLRTSPYGSSLDLSTGSCLGRWGRLHGQEPRPGRAGRPLLVRFGTGRVAAALPGLGAWLYNGAESENEEESPRQESSGEEIIMGDPAQSPESKDSTEMSLERSSQDPSVPQNPPTPLGHSNPLDHQIPLDPPAPEVVPTPSDWTKACEASWQWGALTTWNSPPVVPANEPSLRELVQGRPAGAEKPYICNECGKSFSQWSKLLRHQRIHTGERPNTCSECGKSFTQSSHLVQHQRTHTGEKPYKCPDCGKCFSWSSNLVQHQRTHTGEEPYKCTECEIAFTQSTNLIKHQRSHTGEKP

SEQ ID NO: 11231 - protein, 283 aa, Homo sapiens
  DOMAIN (168)..(189): GLUTELIN SIGNATURE domain identified by eMATRIX, accession number PR00211B, p-value=9.633e-11, raw score of 0.86
AERSSNRQKSKWELGRKDLDQAKEEVVRLPQEEEEGPGAGDESSCGTGGGTHRRSKKAKAPERPGTRVSERLRGARAETQGANHTPVISAHQTRSTTTPPRCSPARERVPRPAPRPRPTPASAPAAIPALVPVPVSAPVPISAPNPITILPVHILPSPPPPSQIPPCSSPACTPPPACTPPPAHTPPPAQTCLVTPSSPLLLGPPSVPISASVTNLPLGLGGLREELCAQGLGIFQSPWSWLLWPVQKPPHFLLCPLKICCQLLWRSCLCQRRTFLSPLLHPA

SEQ ID NO: 11232 - protein, 90 aa, Homo sapiens
  DOMAIN (1)..(29): !!!! PROTEIN ALU SUBFAMILY WARNING ENTRY NUCLEAR PHOSPHO domain identified by eMATRIX, accession number PD02454B, p-value= 4.375e-11, raw score of 11.61
KRDITTSLGQYGQNPSLLKIQILAGYSGTCLKSQLLRRLRHQNRLNLGGRGGSEQRSCHLHSWGGHSETVSKKKKKRERQQWRQIGTCMP

SEQ ID NO: 11233 - protein, 139 aa, Homo sapiens
  misc_feature (1)...(139): Xaa = X or * as defined in Table 2
DFTMSHHYHSAHGTLVLAPRALGNPLSLYPSNYTFPFQHSPSDPCTQSYSLPPEYATHGSSCFDTTDGGLNASRALAGSCAPVSGSLPCCPTLGIPSPPLPHMHKSLPTYPPTPTISMKPPXPCPGSQGPWQSAFTLPI

SEQ ID NO: 11234 - protein, 70 aa, Homo sapiens
  misc_feature (1)...(70): Xaa = X or * as defined in Table 2
ESDFTEYFTHNSCLFCYNKIYINIYIKLSLNCNYGNYFLYIVAAHTQTYIYIXNIFCFFCHLLLTFCLGF

SEQ ID NO: 11235 - protein, 88 aa, Homo sapiens
  misc_feature (1)...(88): Xaa = X or * as defined in Table 2
PLRIWPCXALFLKLSLGFSLFXFYSSLFLLSPPLCXSLPRVQYIYMYILYICICNXYTYIQVCICNGYMYSCSWCSNVWYGYTENMRT

SEQ ID NO: 11236 - protein, 91 aa, Homo sapiens
  misc_feature (1)...(91): Xaa = X or * as defined in Table 2
VSFSSFPPSFPHLSLFFFSLSFSFPPSLFPSSFFTFFGNHLLXISCNPNLMYQWGIFKYKYYQCIFWLLSDFXLKYNENDMSVAFGLRTSL

SEQ ID NO: 11237 - protein, 98 aa, Homo sapiens
  misc_feature (1)...(98): Xaa = X or * as defined in Table 2
DRLKRKNKQSLSYLWEYNKKSNICVTQSLEREEDDRAEKVVEXIMASNFPYLSRDVNLKIQDSXRILNWIKLKKSISKYIIDLLETKDIIRNLESSQR

SEQ ID NO: 11238 - protein, 95 aa, Homo sapiens
  DOMAIN (18)..(67): kw TRANSCRIPTASE REVERSE II ORF2 domain identified by eMATRIX, accession number DM01354Z, p-value=9.604e-14, raw score of 9.06
  misc_feature (1)...(95): Xaa = X or * as defined in Table 2
MCQRVQTPKSPSNPYVHSNICTQLFIAPLSIIAKRWKQPKCPSAEEXINEMXYIHSMEYDSAIKRNEVLIHVTTWKNFENIRLMKDASHKGLYVA

SEQ ID NO: 11239 - protein, 49 aa, Homo sapiens
  misc_feature (1)...(49): Xaa = X or * as defined in Table 2
AVLFYVFHIPYLLVMTLLLYFLPXLPNQCRFSSLHSKTTAWPSTTVTLF

SEQ ID NO: 11240 - protein, 67 aa, Homo sapiens
  misc_feature (1)...(67): Xaa = X or * as defined in Table 2
DNLTLLPRLECGGMIMAHCSLNLTFSSDPAASASXVAGTTGTXHHAWIFVFLCNWLRNRGVTVKKRS

SEQ ID NO: 11241 - protein, 51 aa, Homo sapiens
  misc_feature (1)...(51): Xaa = X or * as defined in Table 2
IFHSKMPISEWKLVXTLWQFFKELKIELPFDPAIPLLGIXPKLAVVAPQHS

SEQ ID NO: 11242 - protein, 48 aa, Homo sapiens
  DOMAIN (19)..(33): 70 KD HEAT SHOCK PROTEIN SIGNATURE domain identified by eMATRIX, accession number PR00301A, p-value=6.538e-17, raw score of 14.84
WLPSLLEPGLHPSNHVQGPAVGIDLGTTYSCVPIGNRTTPSYVALRPG

SEQ ID NO: 11243 - protein, 74 aa, Homo sapiens
  misc_feature (1)...(74): Xaa = X or * as defined in Table 2
NLNQHEKLSMLEXILKSYPKILDNINDHEVSHCSKGNNFKNRSKEWWCGTQDSWRLGNLKVGEEEFNDLTRNTL

SEQ ID NO: 11244 - protein, 90 aa, Homo sapiens
  misc_feature (1)...(90): Xaa = X or * as defined in Table 2
NVWPSSSVRGRNEXGREGGRRRTQQAAGLGPAPSDLWWLWLSWCLQKNMSQGGENLPAGPGSCCGREAQEGAGTSLEDAPFFEAQLLQLH

SEQ ID NO: 11245 - protein, 77 aa, Homo sapiens
  misc_feature (1)...(77): Xaa = X or * as defined in Table 2
WPRNQPTRRPWLKDKLPGVPGGLTGPNPCGQGPPGPPPPLRPSALWSSHSGPPPNGEPLPPRGEXYLHPSPRRTSYL

SEQ ID NO: 11246 - protein, 155 aa, Homo sapiens
  misc_feature (1)...(155): Xaa = X or * as defined in Table 2
RTWWTAASYFRSVGGSASNRPFSIPGPYEFQLPRGHSRKGTTRSRAREPSTLWSTPAAPXRTWWTAASYFRSVGGSASNRPFSIPGPYEFQLPRGHSRKGTTEEQSQGAIYTVEYACSAVKNLVDSSVYFRSVEGLLKQAISIRDHMNASAQGHR

SEQ ID NO: 11247 - protein, 186 aa, Homo sapiens
  misc_feature (1)...(186): Xaa = X or * as defined in Table 2
VSPAVTTSSSLSWARSDLAAEGHARCPLCSGWAQHLSNEEADALSPHTRPIPTTCIXSRTSSLRASTSWPTSHPWPCTGCRSMCVRSLPELAQHKADNAALGRSRAREPSTLWSTPAAPXRTWWTAASTSAAWRVCSNRPSASGTILNASCPGPQVAPGDRPPPLPFPSLQGPSLSCAGEPLLLAY

SEQ ID NO: 11248 - protein, 29 aa, Homo sapiens
MEEKIFSQPGMVAPTCNPSTLGGQGRWIT

SEQ ID NO: 11249 - protein, 81 aa, Homo sapiens
  misc_feature (1)...(81): Xaa = X or * as defined in Table 2
KVGGAKPSLGYLRLGLRLPVFCLHISXAGDFPRGVXLLPRRGSGVVAHTCNPSTLGGQGRQITXGQEFKTGPVNMVKPHLY

SEQ ID NO: 11250 - protein, 60 aa, Homo sapiens
MCVCAHTCPQTSIYIHVFTHGYDCIQVTAQKCLHMCFHIHMSTHACVDTYICIYIHVKLI

SEQ ID NO: 11251 - protein, 73 aa, Homo sapiens
QLTSHLSGGRVNSAWRVLPGRHDSMCVTPVSVSVGSSLSFHFARAWLRIFYGSACEDKPGPPSSHTGNPQRAC

SEQ ID NO: 11252 - protein, 127 aa, Homo sapiens
  misc_feature (1)...(127): Xaa = X or * as defined in Table 2
FVQVQAHKLACKHVQGAYFVFKEQQPEGNVFRCQGVSTSXEHGASSEPWHGPAGAGVTTSFSSPFSGGDRHKFEVSGRRLPTEGLPSNSSFESFPSSIPWPFLFPQVQLSTIWGLKFQFFGDLKILP

SEQ ID NO: 11253 - protein, 591 aa, Homo sapiens
  DOMAIN (322)..(343): 70 KD HEAT SHOCK PROTEIN SIGNATURE domain identified by eMATRIX, accession number PR00301D, p-value=1.000e-26, raw score of 15.51
  DOMAIN (177)..(591): Hsp70 protein domain identified by PFam, accession name HSP70, E-value=2.1e-88, PFam score of 307.1
  misc_feature (1)...(591): Xaa = X or * as defined in Table 2
MCLLVITYSSRHVYNNLTEEQKGRVAFASNFLAGDASLQIEPLKPSDEGRYTCKVKNSGRYVWSHVILKVLVRPSKPKCELEGELTEGSDLTLQCESSSGTEPIVYYWQRIREKEGEDERLPPKSRIDYNHPGRVLLQNLTMSYSGLYQCTAGNEAGKESCVVRVTVQSTMFQGTLQLGIDLGTTYSCVGVFQQRKSPRLIANDQGNRTTPSYVAFTGHXTGWIGDAAKNQVAMNPTNTVFNAKRSDLDGRFXMNAVCPVLIMKHWALYWVGEMMLGRPQGPKXDYKGEDQKAFYPEEGCLLWVPDKDXKEICRSPNLGEELVTNAVVTVPAYFNDSQRQATKDAGTIAGLNVLRIINEPTAAAIAYGLDKKVGAERNVLIFDLGGGTFDVSILTIEDGIFEVKSTAGDTHLGGEDFDNRMVNHFIAEFKRKHKKDISENKRAVRRLRTACERAKRTLSSSTQASIEIDSLYEGIDFYTSITRARFEELNADLFRGTLDPVEKALRDAKLDKSQIHDIVLVGGSTRIPKIQKLLQDFFNGKELNKSINPDEAVAYGAEMRQDKKELLLDPIAEDFLEEVAFDKKRMGFGGF

SEQ ID NO: 11254 - protein, 45 aa, Homo sapiens
  misc_feature (1)...(45): Xaa = X or * as defined in Table 2
LKTLQRAGCSAHACNPSTLGGQGRWIIXAQEFNTSLGNVAKPCLY

SEQ ID NO: 11255 - protein, 95 aa, Homo sapiens
  misc_feature (1)...(95): Xaa = X or * as defined in Table 2
YSKSCHKAYRMKCQLNVGLSCKCCECTEWRDPCELEGQESLWGQVQLAHACNPNTLGGQRGRIAXGQKFKNSLNNIARPHLFKKRKKISLMRWLK

SEQ ID NO: 11256 - protein, 69 aa, Homo sapiens
  misc_feature (1)...(69): Xaa = X or * as defined in Table 2
LYLCSALKKNQXEPGMVTHAWNPSTLGGKGRRTAXAQEFQTSLSNVGRACLYKIYIFKISQAWWHAFVI

SEQ ID NO: 11257 - protein, 103 aa, Homo sapiens
  DOMAIN (13)..(41): !!!! PROTEIN ALU SUBFAMILY WARNING ENTRY NUCLEAR PHOSPHO domain identified by eMATRIX, accession number PD02454B, p-value= 1.161e-22, raw score of 11.61
  misc_feature (1)...(103): Xaa = X or * as defined in Table 2
SHTLGGQHGRIMRSGVRDQPGQHGETPSLLKIQKKKKLPGRAGRHLXSQLLRRLRLENRLNLGGGGGSETEIEPLPPQPGXTQXRLPSQKQNKNLETVSKKKS

SEQ ID NO: 11258 - protein, 45 aa, Homo sapiens
  misc_feature (1)...(45): Xaa = X or * as defined in Table 2
DKVRVSQVRLTSRHLITLRXIRKGRGKKRGCRERNRENRGKXKYV

SEQ ID NO: 11259 - protein, 136 aa, Homo sapiens
  DOMAIN (31)..(53): Globins profile domain identified by eMATRIX, accession number BL01033A, p-value=7.750e-15, raw score of 16.94
  DOMAIN (9)..(136): Globin domain identified by PFam, accession name globin, E- value=6.6e-20, PFam score of 73.9
  misc_feature (1)...(136): Xaa = X or * as defined in Table 2
RPQTYTMVHLTPEEKCAVTALWGKANVDEVGGEALGRLLVVYPWTHRVFETFGDVSTPDAVMGIPNGNADGMNVLWASIDGLAHLDNLRGTFATLTEHDXDXLHVDPEILMLLGNVLICVLAHHCVGEFSPSWQAA

SEQ ID NO: 11260 - protein, 154 aa, Homo sapiens
  misc_feature (1)...(154): Xaa = X or * as defined in Table 2
QRILQSRPFEGRVKQGVTWLLQLVGLVSESHIGPELHLPCSEEECHLLVSFGVNSPEDSSPLLTEWLWTSHLPFLLHCLFGASGRGLQTVPPFVSTALQNVCFPQKGIKAPFLLLSCATGGCSAGLRVYKLRSAPSCDXAGRTRGSSGESAPML

SEQ ID NO: 11261 - protein, 89 aa, Homo sapiens
  misc_feature (1)...(89): Xaa = X or * as defined in Table 2
GSGQADHPCVGWRQNSVNPRQVFLQATGXLISASSGSINTNMAQGTAVVCFGPVYPPKAKGRARSQVTPCLTLPSKGRLCKILCYLFKL

SEQ ID NO: 11262 - protein, 41 aa, Homo sapiens
EFLIRKGDVTGENGFQTMPTTRQAQEQGQERVGCDVVCEAM

SEQ ID NO: 11263 - protein, 51 aa, Homo sapiens
  misc_feature (1)...(51): Xaa = X or * as defined in Table 2
PQRRVARRKRAVLPSTKAXPENTPSTFTSASMEWASRSVHLGHSKRFGNLP

SEQ ID NO: 11264 - protein, 116 aa, Homo sapiens
  misc_feature (1)...(116): Xaa = X or * as defined in Table 2
QLLKDSARSTLVLYPCWARVSQKSGCCPLKVLSQRPGKKLGLLWVEAWECPGAVARCLCHPGPLCPASGTFTVPGTEPHSXLLLRNELPSPLFXLLGQSEPEKWMLPPQGAISETR

SEQ ID NO: 11265 - protein, 37 aa, Homo sapiens
  misc_feature (1)...(37): Xaa = X or * as defined in Table 2
GWRAPTSQPGGPAQVPCSSFXKILPGQHWSSTPAGPE

SEQ ID NO: 11266 - protein, 223 aa, Homo sapiens
  misc_feature (1)...(223): Xaa = X or * as defined in Table 2
DSLLLIQVDTMPFTLHLRSRLPSAIRSLILQKKPDIRNTFSMAGGAPTSQPGGPAQVPCSSFXKILPGQHWSSTPAGPEXARKVDAAPSRCYLRDQPKGPFKVPGTEPHSXLLLRNELPSPLFXLLGQSEPEKWMLPPQGAISETSLRDLSKCLAQNLTHDCCSGTSCPPHCSDSFPYHLAPVLAEIFEIMEKVQPWRNPTGSAICPLHRPSQKPACTGLRRK

SEQ ID NO: 11267 - protein, 94 aa, Homo sapiens
  misc_feature (1)...(94): Xaa = X or * as defined in Table 2
FSEAQFLANVAIKAILSEEISEGKGDRRMLADHTLILTERGSEGPCCXPQEVRPTVLSEWGCKCAQANCECSPXPWPHKSRAGHFPPLSLGKLL

SEQ ID NO: 11268 - protein, 102 aa, Homo sapiens
  misc_feature (1)...(102): Xaa = X or * as defined in Table 2
EIFFNPKREYLSLHWMDEHQCPNFIHHVGQGGLGTIWQDVLQEYNQKNFLYNISLKDKFLGWMWXLTPVIPALWEAEVGGSLEPRSSKTSLGNMARSHPYKK

SEQ ID NO: 11269 - protein, 150 aa, Homo sapiens
  misc_feature (1)...(150): Xaa = X or * as defined in Table 2
IDRLDSAKIFGHLSIFDRCEKRRPDLVSGTGTCSGSFRRVTFQPAVPGRTDSPIPRTHGPNFVPXTLVEKKPPAAWXTPACDLTSKPSIGPTILVPTPKVEPGSLPTPAXDPLEPIQSPEKKXSIVPQTGSFQTASQLTEAVPELVLVAH

SEQ ID NO: 11270 - protein, 86 aa, Homo sapiens
  misc_feature (1)...(86): Xaa = X or * as defined in Table 2
PIPVDLNTLMFCHYFIYVYHPCLEMFSFTCGLLSLXAQRPSDGYFFEAFIYIILFCTMFFLNVQILYSSEKNTVFVDNHSYYTVLR

SEQ ID NO: 11271 - protein, 64 aa, Homo sapiens
  misc_feature (1)...(64): Xaa = X or * as defined in Table 2
QYISVVDTYLLMPRLATAIILWITNXVFEKRVAHFGYHWSLMVRDRRISGVDRYYVSKGLENID

SEQ ID NO: 11272 - protein, 185 aa, Homo sapiens
  misc_feature (1)...(185): Xaa = X or * as defined in Table 2
SPPACLVDGQQALPSGGGLYPNSLRQGSVGQAGRGCLSWFCMVHFANPEDQFLGFQASGFLLHVLKPPQGAATPSGSSQGGPAMFSGLPSEPPTPPATPQNPILHSSTKLLCEAAAPTRGKPCTPSSIFQPWHRTDGKGRAGFSASGTRGRPHLTPPSPVHQTGXEASQKGPALMPPGFQPPKGK

SEQ ID NO: 11273 - protein, 295 aa, Homo sapiens
  DOMAIN (258)..(295): Ribosomal protein L6e proteins domain identified by eMATRIX, accession number BL01170B, p-value=5.821e-37, raw score of 19.54
  DOMAIN (118)..(295): Ribosomal protein L6e domain identified by PFam, accession name Ribosomal_L6e, E-value=2.9e-125, PFam score of 429.6
PTRPCKMAGEKVEKPDTKEKKPEAKKVDAGGKVKKGNLKAKKPKKGKPHCSRNPVLLRGIGRYSRSAMYSRKAMYKRKYSAAKSKVEKKKKEKVLATVTKPVGGDKNGGTRVVKLRKMPRYYPTEDVPRKLLSHGKKPFSQHVRKLRASIYTPGTILIILTGRHRGKRVVFLKQLASGLLLVTGPLVLNRVPLRRTHQKFVIATFTKIDISNVKIPKHLTDAYFKKKKLRKPRHQEGEIFDTEKEKYEITEQRKIDQKAVDSQILPKIKAIPQLQGYLRSVFALTNGIYPHKLVF

SEQ ID NO: 11274 - protein, 70 aa, Homo sapiens
  misc_feature (1)...(70): Xaa = X or * as defined in Table 2
THPPPAEAPGAEGPQXGXAKHPSAPXAPLLPRRRARASSRPVTSVTPSSGGSFRPGTPAQGVITAVTVSA

SEQ ID NO: 11275 - protein, 141 aa, Homo sapiens
  misc_feature (1)...(141): Xaa = X or * as defined in Table 2
NSRVDDFVRPGGSSAAGRQMRGGGQQVPNPRPGFRGQQPXRNGHPVPASPWALAGDAGGMLWNMMRSWPVSGRPTLNPFNKQSGPRQHEQGPGEEVPDVTPEEALPELPPGEPEFRCPERVMDLGLSEDHFSRPVGLFPGL

SEQ ID NO: 11276 - protein, 61 aa, Homo sapiens
  misc_feature (1)...(61): Xaa = X or * as defined in Table 2
RGIITEINKHPDHIHSPTHTCRHTFTNMHAHTHTPTYMHTHTGMFWXKXNXGSLNSRSGFK

SEQ ID NO: 11277 - protein, 67 aa, Homo sapiens
  misc_feature (1)...(67): Xaa = X or * as defined in Table 2
LSDLNGNFHSKVMTKRVNIKGNYLKNMRPGAVAHACNCSTLGGQGGQTAXAQELETSLGNVVRLCLY

SEQ ID NO: 11278 - protein, 97 aa, Homo sapiens
  misc_feature (1)...(97): Xaa = X or * as defined in Table 2
FSRPDHLNGHIKQVHTSERPHKCQVWVGSSSGLPPLEPLPSDLPSWDFAQPALWRCVPFGSXHRLFPFSKKIIPSPXKPGPSTLQQHSDLDPAFISG

SEQ ID NO: 11279 - protein, 88 aa, Homo sapiens
  misc_feature (1)...(88): Xaa = X or * as defined in Table 2
FWKVGCLPWELAHPAYLLPFPLGITSPXALGFPRTGGPWPTPFPPLPRVSRPSQRRLGTIPTXSQPHACPLPLPHSGSRSCFHFWLVK

SEQ ID NO: 11280 - protein, 107 aa, Homo sapiens
  misc_feature (1)...(107): Xaa = X or * as defined in Table 2
FFHVSRNLFYFFRYIKHCYFIFSLIILVSGSRVNLLLLLGLIVYCFLVVFMNFXTWISHFLSFFFFFCRDGVSHCVAQAALFTPGLKCWDSRREPPRPAEMFLFLGT

SEQ ID NO: 11281 - protein, 84 aa, Homo sapiens
  misc_feature (1)...(84): Xaa = X or * as defined in Table 2
SPGTYAPKRIGKGAGNWKPGVPFRSSMWKETQPLSSRVSKVKLSVSPSPPIPVPVPLLPALPKXGHSPLVPSPPLHRSSQGESP

SEQ ID NO: 11282 - protein, 121 aa, Homo sapiens
  misc_feature (1)...(121): Xaa = X or * as defined in Table 2
IQMDCVLLFPAQAQISAPPLIMKTTPTISWGLEHICPSYPWNHSPSLYHRYAMGFGMFFQSGPCSSWAWKLSRTLPSLVVALSSAWPLTRGXRLDLGPPAPSSYVGFSSQASPSPSPAAQC

SEQ ID NO: 11283 - protein, 144 aa, Homo sapiens
  misc_feature (1)...(144): Xaa = X or * as defined in Table 2
MCAYIKIDKGNRMYCTNMIYLVEGIGVTFSLTLMYKYTKLIIMLSYVKRLTLISCAFYVNLWINLYYAMFIXMCAYIKIDKGNRMYCTNMIYLVEGIGVTFSLTLMYKYTKLIIMLSYVKRLTLISCAFYVNLWINLYYAMFIK

SEQ ID NO: 11284 - protein, 113 aa, Homo sapiens
  DOMAIN (63)..(113): Ribosomal protein L6e domain identified by PFam, accession name Ribosomal_L6e, E-value=0.077, PFam score of -84.3
WCILGLCTSLMSRTALFPSRHTFFARSHSAASKLEKKKKEKVLATVTKPVGGDKNGGTRVVKLRKMPRYYPTEDVPRKLLSHGKKPFSQHVRKLRPSITPGTILIILTGRHRG

SEQ ID NO: 11285 - protein, 67 aa, Homo sapiens
GNRRALLRLPALGPPRSSPDGFTPGTTARPSILKRCPMPTPLPPDPSAAAPGTSELWTSPDSSSSSR

SEQ ID NO: 11286 - protein, 107 aa, Homo sapiens
  misc_feature (1)...(107): Xaa = X or * as defined in Table 2
GNPTWLFLPSYQGNSGPAEIQSXGFTPGTTARPSILKRSPMPTPLPPDPSAAAPGTSELWTSPDXQQQQQDGKEAPQSGRHDSSSALRPAAPEALPVSRPPPPPLAA

SEQ ID NO: 11287 - protein, 125 aa, Homo sapiens
  misc_feature (1)...(125): Xaa = X or * as defined in Table 2
SCLLTVISFHQIKKYIYVHTQLTKAGQKEFICRLSLALTNLPPAAPPLAMAPCVSPASRQDTVLGGPQPPSGPAPTAPQQPAXARWQLGPPSPGPSILPPREGRPSAPSGAGWGGDLAGPSQVHF

SEQ ID NO: 11288 - protein, 75 aa, Homo sapiens
  misc_feature (1)...(75): Xaa = X or * as defined in Table 2
MSLMVPLMPYGPGXYLPPSPPAYPIWELPLPQRDSADVSRRLGGRGVAVERDSPTEKSNISKFGLYQVACAVTHL

SEQ ID NO: 11289 - protein, 51 aa, Homo sapiens
  misc_feature (1)...(51): Xaa = X or * as defined in Table 2
IMWYIHIMEYIXPQKGRKILTHATIXMKLEDIMLSEISQSQKNKYCIISVI

SEQ ID NO: 11290 - protein, 118 aa, Homo sapiens
  misc_feature (1)...(118): Xaa = X or * as defined in Table 2
GSPSRCPAFLSSPVAARPPLTHFPTGAGLLRASGEPACLQTGSVSQXPPRAPSSGLPLKHSPHQCSAQHSGKEGLGGGTNTTRENXPSPRPLCMGAQAGRMLLLPAAVRNHVLESGSV

SEQ ID NO: 11291 - protein, 121 aa, Homo sapiens
  DOMAIN (86)..(101): WILM'S TUMOUR PROTEIN SIGNATURE domain identified by eMATRIX, accession number PR00049D, p-value=2.678e-09, raw score of 0.00
  misc_feature (1)...(121): Xaa = X or * as defined in Table 2
PPWVTPRWERGWGVIRDTGDRVRSQRQQGLPPKLQSGWEVESWLGPRPRVFPGSVPGTPRSPAAGGSQPRCPDARPAHKGPRAPGARCGPPPAPPPGLPPAYXPGRPRPRPARRXTPLTAA

SEQ ID NO: 11292 - protein, 362 aa, Homo sapiens
  DOMAIN (163)..(201): Synapsins proteins domain identified by eMATRIX, accession number BL00415O, p-value=1.888e-09, raw score of 3.44
  misc_feature (1)...(362): Xaa = X or * as defined in Table 2
IGPEVPEGCHFRSGESRGDATLAYRVESEHHLGLEGCAGNATLVQGVGRKIPCLGLRGAIILGPQIAVRLGSRIMARPAAPGLSQARSLARRGCPAAGGSQPRCPDARPAHKGPRAPGARCGPPPAPPPGLPPAYXPGRPRRGLHGGRHRSRRPPRRGPAAPGSPPAEVAGASARGRAPGPPPCPRPPPPIPAAPRVEAGPSARPSVPAPAPAPSRSPRLPQPPAAPWGGRASGPKDPGTAPPPPTRTQSARNPSRSPPPAPPSPASAGASADDPGTPWHRTGPPCQSQTRKHTGPXAARDQRQSRRKDDSPTGLCHCLRPGAPKCLKGLWFAFSVHPPWSSTPWLQSGRVNLPLAQDIFLL

SEQ ID NO: 11293 - protein, 63 aa, Homo sapiens
  misc_feature (1)...(63): Xaa = X or * as defined in Table 2
GPHAKSAFFPPXLSEQLGQGXQPGQTPVGRLLALSVAFPQGVGFPKAGGGTGEAFGGLACPLP

SEQ ID NO: 11294 - protein, 75 aa, Homo sapiens
  misc_feature (1)...(75): Xaa = X or * as defined in Table 2
LVLCPLPHSQLTKGTSHTCLTLQGPLXKLTRLALFRLGAVAHACNPSTLGGPRGPITXCQEFKTRLANMVKPLLY

SEQ ID NO: 11295 - protein, 868 aa, Homo sapiens
  DOMAIN (259)..(312): INHIBITOR HEAVY CHAIN CHANNEL IN domain identified by eMATRIX, accession number PD01101B, p-value=1.000e-40, raw score of 21.53
  DOMAIN (277)..(460): von Willebrand factor type A domain identified by PFam, accession name vwa, E-value=1.1e-12, PFam score of 55.5
MAFAWWPCLILALLSSLAASGFPRSPFRLLGVANGIEVYSTKINSKVTSRFAHNVVTMRAVNRADTAKEVSFDVELPKTAFITNFTLTIDGVTYPGNVKEKEVAKKQYEKAVSQGKTAGLVKASGRKLEKFTVSVNVAAGSKVTFELTYEELLKRHKGKYEMYLKVQPKQLVKHFEIEVDIFEPQGISMLDAEASFITNDLLGSALTKSFSGKKGHVSFKPSLDQQRSCPTCTDSLLNGDFTITYDVNRESPGNVQIVNGYFVHFFAPQGLPVVPKNVAFVIDISGSMAGRKLEQTKEALLRILEDMQEEDYLNFILFSGDVSTWKEHLVQATPENLQEARTFVKSMEDKGMTNINDGLLRGISMLNKAREEHRIPERSTSIVIMLTDGDANVGESRPEKIQENVRNAIGGKFPLYNLGFGNNLNYNFLENMALENHGFARRIYEDSDADLQLQGFYEEVANPLLTGVEMEYPENAILDLTQNTYQHFYDGSEIVVAGRLVDEDMNSFKADVKGHGATNDLTFTEEVDMKEMEKALQERDYIFGNYIERLWAYLTIEQLLEKRKNAHGEEKENLTARALDLSLKYHFVTPLTSMVVTKPEDNEDERAIADKPGEASYQPPQNPYYYVDGDPHFIIQIPEKDDALCFNIDEAPGTVLRLIQDAVTGLTVNGQITGDKRGSPDSKTRKTYFGKLGIANAQMDFQVEVTTEKITCGTGRASTFSWLDTVTVTQDGLSMMINRKNMVVSFGDGVTFVVVLHQVWKKHPVHRDFLGFYVVDSHRMSAQTHGLLGQFFQPFDFKVSDIRPGSDPTKPDATLVVKNHQLIVTRGSQKDYRKDASIGTKVVCWFVHNNGEGLIDGVHTDYIVPNLF

SEQ ID NO: 11296 - protein, 108 aa, Homo sapiens
  misc_feature (1)...(108): Xaa = X or * as defined in Table 2
LALEILSYFYLLYLPVWHFGFNSVVALSLKILNIIVYLFSSFKSLRNFSALVSIFFVFCFSSFSACFSLNSKDFFXNPDIEKKPHVKNSRIYKTQYSKDHPQRENQFR

SEQ ID NO: 11297 - protein, 222 aa, Homo sapiens
GRVGFTPGSWEAFMVKNIVPKLGMCLGELVINPHQQHMDAFYWVIDWEGMISVSSLVGLLEKHFFPKWLQVLCSWLSNSPNYEEITKWYLGWKSMFSDQVLAHPSVKDKLNEALDVMNRAVGSYVGAYMQPGARENIAYLTHTERRKDFQYDAMHERRAGPQIGLLRSLGKNLKICAKKEPLEIYLWANLKEYYLAKTGQGPPPFFLTRAPEGLITAWALWG

SEQ ID NO: 11298 - protein, 380 aa, Homo sapiens
RMTSSCPMADRTCPLPFSHRLIWEVWMPFVRNIVTQWQPRNCDPMVDFLDSWVHIIPVWILDNILDQLIFPKLQKEVENWNPLTDTVPIHSWIHPWLPLMQARLEPLYSPIRSKLSSALQKWHPSDSSAKLILQPWKDVFTPGSWEAFMVKNIVPKLGMCLGELVINPHQQHMDAFYWVIDWEGMISVSSLVGLLEKHFFPKWLQVLCSWLSNSPNYEEITPKWYLGWKSMFSDQVLAHSIWSRDKFNEALDIMNRAVSSTVGAYKQPGARENIAYLTHTERRKDFQYEAMQERRRPENMAQRGIGVAASSVPMNFKDLIETKAEEHNIVFMPVIGKRHEGKQLYTFGRIVIYIDRGVVFVQGEKTWVPTSLQSLIDMAK

SEQ ID NO: 11299 - protein, 124 aa, Homo sapiens
  misc_feature (1)...(124): Xaa = X or * as defined in Table 2
PSRTRIKTKQMATSEILPSFVATMDASNFSFWQVLCSWLSNSPNYEEITKWYLGWKSMFSDQVLAHPSVKDKFNEALDIMNRAVSSNVGKXGFPFWMSWPQVSDFTHVNDTESEFSGSCRQPKP

SEQ ID NO: 11300 - protein, 98 aa, Homo sapiens
  misc_feature (1)...(98): Xaa = X or * as defined in Table 2
EMHVYWTERSGSRLXSEHFGRPRWVDHXRQEFETQPGQYGDTPSLLHPLLSTSCPSFLSLFSFLVTFFFSSSFLSLFLIYLLSRHDFLACDCFPLFLD

SEQ ID NO: 11301 - protein, 72 aa, Homo sapiens
  misc_feature (1)...(72): Xaa = X or * as defined in Table 2
GSRXHNLQIIGRPRRADHLRSGVXDQPGQHGETPVSTRNTRISQAWWWTPVIPATQEAEAGESLEPGRWRLW

SEQ ID NO: 11302 - protein, 36 aa, Homo sapiens
SHIPAASRRIIPQVGHPPLPLPPPPQSHAGVAAGDE

SEQ ID NO: 11303 - protein, 45 aa, Homo sapiens
GQQICPENKSHIPAASRRILPQVGHPPLPLPPPPQNHAGVAAGDE

SEQ ID NO: 11304 - protein, 493 aa, Homo sapiens
  DOMAIN (7)..(160): 7-fold repeat in Clathrin and VPS domain identified by PFam, accession name Clathrin_repeat, E-value=0.0018, PFam score of 22.8
MVTHACNPTTIGKLEPSYVIRKFLDAQRIHNLTAYLQTLHRQSLANADHTTLLLNCYTKLKDSSKLEEFIKKKSESEVHFDVETAIKVLRQAGYYSHALYLAENHAHHEWYLKIQLEDIKNYQEALRYIGKLPFEQAESNMKRYGKILMHHIPEQTTQLLKGLCTDYRPSLEGRSDREAPGCRANSEEFIPIFANNPRELKAFLEHMSEVQPDSPQGIYDTLLELRLQNWAHEKDPQVKEKLHAEAISLLKSGRFCDVFDKALVLCQMHDFQDGVLYLYEQGKLFQQIMHYHMQHEQYRQVISVCERHGEQDPSLWEQALSYFARKEEDCKEYVAAVLKHIENKNLMPPLLVVQTLAHNSTATLSVIRDYLVQKLQKQSQQIAQDELRVRRYREETTRIRQEIQELKARVKAMPPPGKVPRKENLWLQCEWGSCSFVCSTMEKFFEHVTQHLQQHLHGSGEEEEEEEEDDPLENSVNKDIRNKSAILPSRSNC

SEQ ID NO: 11305 - protein, 129 aa, Homo sapiens
  misc_feature (1)...(129): Xaa = X or * as defined in Table 2
ELGIVGKHAPTGGAGYHFLLGMAAEVLSKFTAVLEGAGTAFPATQHHRVVLADCFVFTETDCVLPHADKTTQDCRRNSVPGATHSAPTDNRKWSGISGMTFRLWKSRMQGPRSAWLCXACSPHCFSLVW

SEQ ID NO: 11306 - protein, 272 aa, Homo sapiens
  misc_feature (1)...(272): Xaa = X or * as defined in Table 2
MAGAEGAAGRQSELEPVVSLVDVLEEDEELENEACAVLGGSDSEKCSYSQDKAKVNSGNKYNDNFFGLYCICKRPYPDPEDEVRELEVKPGVTKISTEDDGLVRNIDGIGDQEVIKPENGEHQDSTLKEDVPEQGKDDVREVKVEQNSEPCAGSSSESDLQTVFKNESLNAESKSGCKLQELKAKQLIKKDTATYWPLNWRSKLCTCQDCMKMYGDLDVLFLTDEYDTVLAYENKGKIAQATDRSDPLMDTLSSMNRVQQVELICGIQXFED

SEQ ID NO: 11307 - protein, 614 aa, Homo sapiens
  DOMAIN (145)..(176): Protein kinases ATP-binding region proteins domain identified by eMATRIX, accession number BL00107A, p-value=4.316e-18, raw score of 18.39
  DOMAIN (145)..(225): Eukaryotic protein kinase domain identified by PFam, accession name pkinase, E-value=9.1e-28, PFam score of 104.0
MEKALQKRDYIFGNYIERLWAYLTIEQLLEKRSHITCRKLSLPPPGFLVIPMSPSGLLQHLAIFWVAVITTGIVSAMVALLNPIENPDLKLAIVMLIVPFFVNGFYSQVAKPLLVDVDLQYPQDAVLALTQNHHKQYYEGSEIVYLHEKHILHRDLKTQNVFLTRTNIIKVGDLGIARVLENHCDMASTLIGTPYYMSPELFSNKPYNYKSDVWALGCCVYEMATLKHAFNAKDMNSLVYRIIEGKMILTDSKASCGPWKPDWLGSMTPERASGRKLEKFTVSVNVAAGSKVTFELTYEELLKRHKGKYEMYLKVQPKQLVKHLSHTASYQPPQNPYYYVDGDPHFIIQIPEKDDALCFNIDEAPGTVLRLIQDAVTGEACGLGPGPGGSSWEGLGPPRASGRTMEQFTIHLTVNPQSKVTFQLTYEEVLKRNHMQYEIVIKVKPKQLVHHFEAGAQEAPIKKKRPPVKDEDLKGARGNLTKNQEIKSKTYQVMRECGPGAAFELSIGVIDGDPLESHMQACKQDRSSKLVSIMDFADFGTTIKQDFRLLGQTSVDRLLQLSQGQAVKGNQLLPVSLVKRKTTLAPNTQTASPRALADSLMQLARQVSRLESGQ

SEQ ID NO: 11308 - protein, 195 aa, Homo sapiens
  misc_feature (1)...(195): Xaa = X or * as defined in Table 2
GAEETWEPTDGSGSAAQDGVQWCDLGSLQPLPPGLKPSSHLNLPSSGTAGXRPCALPGKVPRKENLWLQCEWGSCSFVCSTMEKFFEHVTQHLQQHLHGSGEEEEEEEEDDPLEEEFSCLWAGMWLLFSGQFCLTSSAMSYFHCYHTKLKQWGLQALQSQADLGPCIPGISRAGTSSLISLTTSCVWGTTGEILR

SEQ ID NO: 11309 - protein, 180 aa, Homo sapiens
  misc_feature (1)...(180): Xaa = X or * as defined in Table 2
RSGGRNISSRKSITAHRSISAPGSISAQGSIPALKSILAHGSIPSQGXDTPLGWDAPMGXDALEGWDAPLGXDASRGXDTPMGRDALSGXYVPSPTPSSWANALPCHFLPQMFPLTNVMPTNPISAELNCGRGAGWQEWMCPGLLQAPVPNHIHSCSPTASRGLRGQLSSQLPETAKAAW

SEQ ID NO: 11310 - protein, 64 aa, Homo sapiens
  DOMAIN (40)..(50): GLYCOPROTEIN PROTEIN SPIKE E2 PRECURSOR PEPLOMER domain identified by eMATRIX, accession number PD00866L, p-value=8.527e- 10, raw score of 3.73
  misc_feature (1)...(64): Xaa = X or * as defined in Table 2
WFETIEATQLYFNELPDTFHCVLCFLLCHFYINVKAFCCCCCCSCCXNTCSLIFRPTVYYALML

SEQ ID NO: 11311 - protein, 29 aa, Homo sapiens
LTSGTYPKSGKAVEEAQPNSPPAEDVRDR

SEQ ID NO: 11312 - protein, 111 aa, Homo sapiens
  misc_feature (1)...(111): Xaa = X or * as defined in Table 2
GNLVTAFQLVLCIPDESLYRSICFLLHHQKLHISVPQSPRWGWTSLGLAGTPRCSPLPTPPRLLLPQPSRPKGATGKIPRPDRRTPVRPLGHKEPRGTXGKSWPAVAQPPG

SEQ ID NO: 11313 - protein, 108 aa, Homo sapiens
  DOMAIN (45)..(63): MITOCHONDRIAL BROWN FAT UNCOUPLING PROTEIN SIGNATURE domain identified by eMATRIX, accession number PR00784D, p-value=5.091e- 21, raw score of 15.86
  DOMAIN (1)..(69): Mitochondrial carrier proteins domain identified by PFam, accession name mito_carr, E-value=2.2e-20, PFam score of 72.8
AGSTTGALAVAVAQPTDVVKVRFQAQARAGGGRRYQSTVNAYKTIAREEGFRGLWKGTSPNVARNAIVSVLVELTFDSVGGLVPARIPSVPSLGKFSQNLRPAPDSPA

SEQ ID NO: 11314 - protein, 68 aa, Homo sapiens
  DOMAIN (31)..(44): Mitochondrial energy transfer proteins domain identified by eMATRIX, accession number BL00215B, p-value=1.900e-09, raw score of 10.44
  DOMAIN (7)..(67): Mitochondrial carrier proteins domain identified by PFam, accession name mito_carr, E-value=8.5e-20, PFam score of 70.8
VKERKEDVVKTRYMNSALGQYSSAGHCALTMLQKEGPRAFYKGFMPSFLRLGSWNVVMFVTYEQLKRA

SEQ ID NO: 11315 - protein, 219 aa, Homo sapiens
  DOMAIN (103)..(123): MITOCHONDRIAL BROWN FAT UNCOUPLING PROTEIN SIGNATURE domain identified by eMATRIX, accession number PR00784B, p-value=3.903e- 21, raw score of 13.35
  DOMAIN (17)..(166): Mitochondrial carrier proteins domain identified by PFam, accession name mito_carr, E-value=2e-21, PFam score of 76.3
  misc_feature (1)...(219): Xaa = X or * as defined in Table 2
QEISIMVGFKATDVPPTATVKFLGAGTAACIADLITFPLDTAKVRLQVRGXSLGVLMVSTLFPPQRHRPLKGQCLEHRDDWRWEGQHAYPCSYPVLALQIQGESQGPVRATASAQYRGVMGTILTMVRTEGPRSLYNGLVAGLQRQMSFASVRIGLYDSVKQFYTKGSEREYGARVXAGNQHHGWVQGHRCAPYCHCEVSWGWHSCLHRRSHHLSSGYC

SEQ ID NO: 11316 - protein, 74 aa, Homo sapiens
  misc_feature (1)...(74): Xaa = X or * as defined in Table 2
NFKYILFKILHLGEKIYNNVYTCFNNLFHCTTYILYNSTINQPKKITSXHLNKNLPCKKHSMGHYKVVFKIFFK

SEQ ID NO: 11317 - protein, 108 aa, Homo sapiens
  misc_feature (1)...(108): Xaa = X or * as defined in Table 2
QRLLKNNCVITCSXQRPRVFSSSPQGLAACHYRGLRSSPQSRGRCLSHFSCQGVHPRSCQRGSAWSPRTTGQRGPTVGTGRTKRRLNTAYLLGAASADILRPIPSTSR

SEQ ID NO: 11318 - protein, 125 aa, Homo sapiens
SYQPPQNPYYYVDGDPHFIIQIPEKDDALCFNIDEAPGTVLRLIQDAVTGEACGLGPGPGGSSWEGLGPPRASGRTMEQFTIHLTVNPQSKVTFQLTYEEVLKRNHMQYEIVIKVKPKQLVHHFE

SEQ ID NO: 11319 - protein, 36 aa, Homo sapiens
  misc_feature (1)...(36): Xaa = X or * as defined in Table 2
APPXTHKWKIPHPTSCDRSLSTCWHTTVDSTSLREK

SEQ ID NO: 11320 - protein, 193 aa, Homo sapiens
  DOMAIN (10)..(26): PRION PROTEIN SIGNATURE domain identified by eMATRIX, accession number PR00341D, p-value=9.341e-09, raw score of 0.26
  misc_feature (1)...(193): Xaa = X or * as defined in Table 2
PTLMLHYIPWGRGRLGGWGQCGQSHSARCAGTGTCLPMGTLMHMHEASRQVWGGCILPLPFPYFLPPQLPSXLGPSNIWVAKDGWLRDLLDPPXYEWTLGVNWPSPGILAYWTVSAPSLGFSGPITDAALPCPYNLGGSSPHPRRGSRFQKTGLSLTEGNLPFPPPIPPTPYLPHFLHIRVWPANVEQMRCRK

SEQ ID NO: 11321 - protein, 62 aa, Homo sapiens
  misc_feature (1)...(62): Xaa = X or * as defined in Table 2
FFFPIXSVXKVSAQGXSLWPGVAAHIYHFSILGGQGGRITXGQEFKTSLGNIVRPHLYKSGG

SEQ ID NO: 11322 - protein, 123 aa, Homo sapiens
  misc_feature (1)...(123): Xaa = X or * as defined in Table 2
LLPYGLDRGPYGGVWCGLPYPSGTVSTGPPQRTASPLPKQSSGPQPPEFAACTGTDAIXDARDAGDAGEGGSSGAEPASSPAGAAGGGCGLAARSQVPSEIRSGWLKGSLPQLASSGALVICP

SEQ ID NO: 11323 - protein, 225 aa, Homo sapiens
  misc_feature (1)...(225): Xaa = X or * as defined in Table 2
GGCGRRTVLVKDYQFFAEGRLIQFRWENAAARFSALAPDMQRQNFRPPTPPYPGPGGGGWGTGSNFRGTPGGGGPRTALPSRRVRGVRTTRRRTGPRSXARNGSKSLSAKRRQLSRGARFGSPSPGGYPGSYSRSPAGSQQQFGLLPRAAADPPPRVLQGHLHHLDQGVLEKKECLMSWKINFKAFKCLKIPWGWPRTQGICSGYKPNNTAILKHSQAKKEDTFC

SEQ ID NO: 11324 - protein, 65 aa, Homo sapiens
AQPAVRPRFSASCSQPPFTPPLSPHLRARARPRRERQKYTPSLDGFFWGETPAGGCGNHIHPWQG

SEQ ID NO: 11325 - protein, 206 aa, Homo sapiens
  misc_feature (1)...(206): Xaa = X or * as defined in Table 2
MTKRCLDHRGEWLPGAGGGGHTEGTRCLHHAPVTWVGIEVDIFEPQGISMLDAEASFITNDLLGSALTKSFSGKKPVWLRGRHTPKGNLDSEVLAGLSPCPIPLAGLTVNGQITGDKRGSPDSKTRKTYFGKLGIANAQMDFQVEVTTEKITLGTGRASTFSWLDTVTVTQDGXAPLQGLQGGLQGEGDHSGPQPNPGALSEPELV

SEQ ID NO: 11326 - protein, 133 aa, Homo sapiens
  misc_feature (1)...(133): Xaa = X or * as defined in Table 2
YHHLQGRDIPGNLRVEGSVPHPAVRPRFSASCSQPPFPPPLSPHLRARARPRWERQKFTPSLDGSFWGETPAGGCGSHIHPWQGPRALFRRRSQXPRRXAHMEGRVGRRSPLLHPPWEKTPSXLSGLTDRKQA

SEQ ID NO: 11327 - protein, 187 aa, Homo sapiens
  misc_feature (1)...(187): Xaa = X or * as defined in Table 2
ETFSSHFERPYLQFKAEPPLTSRGFVEKSTALHRISAEHPESMMSEVHERALQQHPQAQGGLLETREKMHADNNFTKTQDRLHASSDAFSGLRFQSGTSRGYQRQMVPREEIKSTSAKSSVVSLADTAPNFSRLLSNVTVMEGSPVTLEVEVTGFPEPTLTWWVAYNDKPXMETNSITEKNHSVSTN

SEQ ID NO: 11328 - protein, 85 aa, Homo sapiens
  misc_feature (1)...(85): Xaa = X or * as defined in Table 2
LSTMLHQHLLSVLLKLSQSLYVVYSFFLIQSTLQSGTRVTFLKCRLQAGAVAQACNASTLEGXGGWIARAQEFETNLGNRARPCL

SEQ ID NO: 11329 - protein, 67 aa, Homo sapiens
NGWVGDVDDYSLHGGCLVTRGTKWIANNWINVDPSRARQALFQQEMARLAREGGTDSQPEWALDRAY

SEQ ID NO: 11330 - protein, 227 aa, Homo sapiens
  misc_feature (1)...(227): Xaa = X or * as defined in Table 2
GSGPHSPGKWMVDDSREHSRDVRSGSRLTLMVTECLSLQEFSNMDLWDFHKYMRSHKAESSELVRNSHHTCLYQGEGAHHIMRAIRQRVLRLTRLSPEIVELIEPLQVVRYGEGGHYHAHVDSGPVYPXTICSHTKLVANESVPFETSCRYMTVLFYLNNVTGGGETVFPVADNITYDEMSLIQDDVDLRDTRRHCDKGNLRVKPQQGTSSLLVPTTCLMGKVGWVT

SEQ ID NO: 11331 - protein, 67 aa, Homo sapiens
  misc_feature (1)...(67): Xaa = X or * as defined in Table 2
FLMRSEFLXKVFPHPXHSXGFPCVCSLMSCVGXLLGEGFSTFMTFIRFFPWMCSPDDSGFEIFPLIS

SEQ ID NO: 11332 - protein, 908 aa, Homo sapiens
  DOMAIN (57)..(100): kw TRANSCRIPTASE REVERSE II ORF2 domain identified by eMATRIX, accession number DM01354T, p-value=1.000e-40, raw score of 9.48
  DOMAIN (776)..(852): Zinc finger, C2H2 type domain identified by PFam, accession name zf-C2H2, E-value=1.3e-10, PFam score of 48.7
  misc_feature (1)...(908): Xaa = X or * as defined in Table 2
MIISIDAEKAFDEIQQCFMLKTLNKLGIDGTYLKIIRAIYDKPTANIILNGQKLEAFPLKISTRQGCPLSPLLFNIVLEVLARAIRQEKEIKCIQLGKEEVKLSLFADDMIVYPENPIVAAQNLKLISNFSKVSGYKINVQKSQAFLYINNRQTESQIMSELPFTIASKRTKYLGIQLTRDVKDLFKENYKPLLSEIKQDTNKWKNIPCSWVGRINIMKMAILPKGIASFTGYCIPKPEVILKLETGKEPWILEEKFRSQSHLEEPSEYNNNGNSFWLNEDLIWHQKIKNWEQPFEYNECGKAFPENSLFLVHKRAYTGQKTCKYTEHGKTCYMSFFITHQQTHPRENHYECNECGESIFEESILFEHQNVYPFSQNLNPTLIQRTHSISNIIEYNECGTFFSXDRVSLCLPGXSTVARSQLSAASISQVKRSSHCLCLLSTSDYRCMPPCLANLCIFCRDNCAMLPRLVSNSXAQNLKLISNFSKVSGYKINVQKSQAFLYINNRQTESQIMSELPFTIASKRTKYLGIQLTRDVKDLFKENYKPLLSEIKQDTNKWKNIPCSWVGRINIMKMAILPKGIASFTGYCIPKPEVILKLETGKEPWILEEKFRSQSHLEEPSEYNNNGNSFWLNEDLIWHQKIKNWEQPFEYNECGKAFPENSLFLVHKRAYTGQKTCKYTEHGKTCYMSFFITHQQTHPRENHYECNECGESIFEESILFEHQNVYPFSQNLNPTLIQRTHSISNIIEYNECGTFFSEKLALHLQQRTHPGEKPYECHECGKTFTQNFTEHLRRHTGEKPFGCNECGKTFHQKLALIVHQRTHIRQKPYGCNECGKSFCVKSKLIAHHRTYTGEKPYECNSGGVRPALWDERSCGYVSAGTKRAEGEVWKGQGEEMGSIVERLVTLSK

SEQ ID NO: 11333 - protein, 69 aa, Homo sapiens
MNHKIYVYGHTQQFLYCSYVFKRYEFYSNPTLQGFLCSPHSYFYKYLLLTGRNLAIIILNIFAQWYQSL

SEQ ID NO: 11334 - protein, 117 aa, Homo sapiens
  DOMAIN (79)..(98): ANDROGEN RECEPTOR SIGNATURE domain identified by eMATRIX, accession number PR00521B, p-value=5.840e-09, raw score of 11.77
  misc_feature (1)...(117): Xaa = X or * as defined in Table 2
RAEIPTAGEVWDGAGPMGAELKPWARQRKVEMDHVGPLLSPPPGRSXSPGPGRGRSRWTMLGPFSPRPQAAVRGPRPGVLGSPREALEPPGARHPRAVTAAPRELQGCGSTVRAVAR

SEQ ID NO: 11335 - protein, 80 aa, Homo sapiens
  misc_feature (1)...(80): Xaa = X or * as defined in Table 2
ALLGWFVNLYKEITTTTPSFRRRSYILGFVKLYVSEHFHFFFWVLYYFLXMHCEKFYFRRCNAGRRSQIMYIVFLKSLSS

SEQ ID NO: 11336 - protein, 906 aa, Homo sapiens
  DOMAIN (268)..(321): INHIBITOR HEAVY CHAIN CHANNEL IN domain identified by eMATRIX, accession number PD01101B, p-value=1.000e-40, raw score of 21.53
  DOMAIN (286)..(469): von Willebrand factor type A domain identified by PFam, accession name vwa, E-value=2.7e-12, PFam score of 54.3
FSDGLCMVALSHLGSALQLGSLCFPRSPFRLLGKRSLPEGVANGIEVYSTKINSKVTSRFAHNVVTMRAVNRADTAKEVSFDVELPKTAFITNFTLTIDGVTYPGNVKEKEVAKKQYEKAVSQGKTAGLVKASGRKLEKFTVSVNVAAGSKVTFELTYEELLKRHKGKYEMYLKVQPKQLVKHFEIEVDIFEPQGISMLDAEASFITNDLLGSALTKSFSGKKGHVSFKPSLDQQRSCPTCTDSLLNGDFTITYDVNRESPGNVQIVNGYFVHFFAPQGLPVVPKNVAFVIDISGSMAGRKLEQTKEALLRILEDMKEEDYLNFILFSGDVSTWKEHLVQATPENLQEARTFVKSMEDKGMTNINDGLLRGISMLNKAREEHRIPERSTSIVIMLTDGDANVGESRPEKIQENVRNAIGGKFPLYNLGFGNNLNYNFLENMALENHGFARRIYEDSDADLQLQGFYEEVANPLLTGVEMEYPENAILDLTQNTYQHFYDGSEIVVAGRLVDEDMNSFKADVKGHGATNDLTFTEEVDMKEMEKALQERDYIFGNYIERLWAYLTIEQLLEKRKNAHGEEKENLTARALDLSLKYHFVTPLTSMVVTKPEDNEDERAIADKPGEDAEATPVSPAMSYLTSYQPPQNPYYYVDGDPHFSIIQIPEKDDALCFNIDEAPGTVLRLIQDAVTGLTVNGQITGDKRGSPDSKTRKTYFGKTGASPMAQMGFPGWEVTTEKITLLEQARCRAFFSWLDTVTVTQDGHFLASSRRLSMMINRKNMVVSFGDGVTFVVVLHQVCWKKHPVPTVDFLGFYVVDSHRMSAQTHGLLGQFFQPFDFKVSDIRPGSDPTKPDATLVVKNHQLIVTRGSQKDYRKDASIGTKVVCWFVHNNGEGLIDGVHTDYIVPNLF

SEQ ID NO: 11337 - protein, 59 aa, Homo sapiens
  misc_feature (1)...(59): Xaa = X or * as defined in Table 2
IFFQPKECLYKNLXGLGAVAHACNPSTLGGXGGWISXVQEFETSLGNMAKPRLYKKYKN

SEQ ID NO: 11338 - protein, 44 aa, Homo sapiens
  misc_feature (1)...(44): Xaa = X or * as defined in Table 2
YFPNKHGILCRVQWLSLXYQPPLWESEVGVLLELKSWRTAWATW

SEQ ID NO: 11339 - protein, 43 aa, Homo sapiens
  misc_feature (1)...(43): Xaa = X or * as defined in Table 2
ATCLSLEKIQKLLIQNPGRRXASCDSSLLLGCSPDLSSHFTVL

SEQ ID NO: 11340 - protein, 37 aa, Homo sapiens
NRPCSQKAQWLIPMLSRWFLAWELLSFAAPFPKLCSS

SEQ ID NO: 11341 - protein, 108 aa, Homo sapiens
SWTAPEEALFSSRKLDGGSQKWLIGRGQASFQGSAVPSWFREGRAWLSLALSLSPCLSITTFPPEEKNYLPCKARFYTDFTNCAKNRPCSQETCLEILGWTIEAQKDT

SEQ ID NO: 11342 - protein, 54 aa, Homo sapiens
VLQLFKMSSLPLMITDTQQAVSSGLWIGIQIQSLTQRGRGCAPRMPRKAYISLT

SEQ ID NO: 11343 - protein, 86 aa, Homo sapiens
TTHAAHALRIGSRIRDFPGRRFRCYHHRTSLILTDRDKYPFTPVILTSLHSFCFLLPSFPRQSPPAVYSNYVGNYLFYLLNKRSDG

SEQ ID NO: 11344 - protein, 44 aa, Homo sapiens
SSSKRNRYKFKKKRTSYKVNTAELSSLEANWRVCAGSCRDTTRL

SEQ ID NO: 11345 - protein, 30 aa, Homo sapiens
RAGWIFSICLVRKSIFLLKKSLASSAVFST

SEQ ID NO: 11346 - protein, 97 aa, Homo sapiens
  misc_feature (1)...(97): Xaa = X or * as defined in Table 2
MSSLPLMITDTQQAVSSGLWIGIPNYRVFTPTGTWVRXPHATESLHKFNLNRTWEMGLQRRAVXTXGTNVKALESAQQPWNQAGRGDNFLLWRKGGD

SEQ ID NO: 11347 - protein, 151 aa, Homo sapiens
  DOMAIN (85)..(92): RNA-DEPENDENT DNA-POLYMERASE (MSDNA) SIGNATURE domain identified by eMATRIX, accession number PR00866I, p-value=2.875e- 09, raw score of 7.66
RAGRGGEGHKLNSYGGRRARSQGHLLSSALSPFVSAASYQPPQNPYYYVDGDPHFIIQIPEKDDALCFNIDEAPGTGLRLIQDAVTGLTVNGQITGDKRGSPDSKTRKTYFGKLGIANAQMDFQVEVTTEKITCGTGRASTFSWLDTVTVT

SEQ ID NO: 11348 - protein, 120 aa, Homo sapiens
  misc_feature (1)...(120): Xaa = X or * as defined in Table 2
EPRMLYTRYVSDPEFVISRVDDFVVLQLFRMSSLPLMITDTQQAVSSGLWIGIQIQSLTQPGSTISXYCSFFKSVIICHLMITXYTTSSFFRPCGLASQIPESYPAGTWVRAPHAMEKLT

SEQ ID NO: 11349 - protein, 106 aa, Homo sapiens
  misc_feature (1)...(106): Xaa = X or * as defined in Table 2
PNNKHPYKSVTILSLCAVLFSLYIFNSGHFYFTSSIQFRHLNPKFNNLFYQTFVLRTKFLXIIXQIKAEPLIVEHKXKIIYKKPYLFNTQVLALKLKRXGFLYIIS

SEQ ID NO: 11350 - protein, 90 aa, Homo sapiens
  misc_feature (1)...(90): Xaa = X or * as defined in Table 2
MVFHKARTRMKERTDTAMQAESASETNKRAHPALPPVLPGXGRWARRGQEAPRPHLLSPQSGQGGQAPPWRERGVTRLKLGEGCRGRLAP

SEQ ID NO: 11351 - protein, 86 aa, Homo sapiens
STLGGSLCAQSGCSFEPLPLRGPHPAMPVKCAQPLFSSPCPPCLPRAAREGEQGEHACWFQMHFLLALPYLCVPSSWSWLYGTPCF

SEQ ID NO: 11352 - protein, 313 aa, Homo sapiens
  DOMAIN (113)..(152): Transmembrane 4 family proteins domain identified by eMATRIX, accession number BL00421B, p-value=2.038e-20, raw score of 17.62
  DOMAIN (79)..(261): Transmembrane 4 family domain identified by PFam, accession name transmembrane4, E-value=6.5e-31, PFam score of 101.8
MCWAPSTRGGSPALHLPLLLLPHPLPARCTGFRAPAVPSSPAGIFGHIAVIGSPFPTAGGNTSDSFSNGCSQDVGSPRLCGCGLLGVGIWLSVSQGNFATFSPSFPSLSAANLVIAIGTIVMVTGFLGCLGAIKENKCLLLSFFISPVAELILLILFFVYMDKVNENAKKDLKEGLLLYHTENNVGLKNAWNIIQAEMRCCGVTDYTDWLPSAGGEHGSRPLLHGRTPRAAGATAPRLCGERAAMKRSWGMAFSMTLFQHIHRTGGNHVHLGPKIFASFPGATDISSGLGGDYIICDPKEKKYRKPKREPHLQ

SEQ ID NO: 11353 - protein, 70 aa, Homo sapiens
  misc_feature (1)...(70): Xaa = X or * as defined in Table 2
DTGPCWRERGVTRLKLGEGCRGRLAPXHLLPPPKSSSQPCAPLTPTAGWLPEEKAEVCSGCPPCSPSYKP

SEQ ID NO: 11354 - protein, 110 aa, Homo sapiens
  DOMAIN (2)..(37): Matrix protein (MA) p15. domain identified by eMATRIX, accession number PF01140D, p-value=7.384e-09, raw score of 15.54
  misc_feature (1)...(110): Xaa = X or * as defined in Table 2
HSLISQREKESERERARESEREXXRASERERERGRDKIPTRKGGEEVQFLQTIHFFFLIFLTAFFEQYFKERGSYYRYRGGKAKKGGRGEEKNSRSRNPSRSFTGRKKRV

SEQ ID NO: 11355 - protein, 66 aa, Homo sapiens
  misc_feature (1)...(66): Xaa = X or * as defined in Table 2
NWSAGAALLSAAPAHTPSPHQARPTPGSPPSAALWGSPSPSRSPPHFSPTPDLXMRPERHPSSAPF

SEQ ID NO: 11356 - protein, 75 aa, Homo sapiens
  misc_feature (1)...(75): Xaa = X or * as defined in Table 2
ARCGGMHLYSQIFGRLRWEHCLRXKVLSQVWWHAPVFADIWEVEVGALLEARSLRLXCAMLLPVNSHGPPTWAMQ

SEQ ID NO: 11357 - protein, 71 aa, Homo sapiens
  misc_feature (1)...(71): Xaa = X or * as defined in Table 2
MLKAQHLQGPAWGPPMPGLFQLRSAHGSHGAAAKAMVQRQMPPQAVTGTXXXQGGHCPQPPRAXYAQDAPG

SEQ ID NO: 11358 - protein, 139 aa, Homo sapiens
MGCFIREGGEEGNLIIKKRFVSEAELDVRRKRRQEEWENVRKPEDPEECPEEVYDPRSLYERLQEQKDRKQQELRGTVSNCKNMVRGLDEDETNFLDEVSRQQELIEMHRIEEELIELNEYRIALWNVGISYENYEGRG

SEQ ID NO: 11359 - protein, 88 aa, Homo sapiens
AGSGTIGMLRPADERGGQSRCRGSAHPISQAAPCPAFLNRPFTGPSCGPSVTSLRNTAGFCPEGPGCPPSLAEASCPLPSCRAGSHWA

SEQ ID NO: 11360 - protein, 73 aa, Homo sapiens
  misc_feature (1)...(73): Xaa = X or * as defined in Table 2
TVSVQRHQAVQSPVVVFTEHIPQDAWCSPSCAPGPNXPPLCPTNKPCALQQGMKPLALKKSLGGTVCCGSKRD

SEQ ID NO: 11361 - protein, 162 aa, Homo sapiens
  misc_feature (1)...(162): Xaa = X or * as defined in Table 2
DLADCSLQLQSRSSWKKCSTMLQKVLVPPEAATSLSHPTPRPLPHPPALGSPLQPPSNTFGPXCCLSQDAPVFPSPVKLHLVTVPASSLANESRKGPSPRVFSRTPAPSSSSITSISDSGIQNATVWSGVRLSVSASSFGLLTSPFSASGVSLSVSPLASTL

SEQ ID NO: 11362 - protein, 138 aa, Homo sapiens
  misc_feature (1)...(138): Xaa = X or * as defined in Table 2
IRILYRSPHLQLPCLTRFLVKKSYSVTGNWMVSLKDXSLRLDCWHGPLNLVKLDEVWQNLGTSTKSLLXNNFKNILGKINTFKTLFGGGMKLIPCKVSFSIYLMVNLESHDSTWHLQANQTPHFDVSPVLVLEFPFKF

SEQ ID NO: 11363 - protein, 255 aa, Homo sapiens
  misc_feature (1)...(255): Xaa = X or * as defined in Table 2
ELLFDKSTMRRPFGQKASSLPPIVGSRKSKGSGNDRHSKSTVGSSDNSSPQPLKRKGKKEDVNSEKLTKLKQNVKLKNSQETIPNSDEGIFKAGAERSETRGAAEVQEDEDTQVEVPVDQRPAEIVDEEEDGEKANKDAEQKEDFSGMNGDLXEEGGREATDAPEQVEEILDHSEQQARPARVNGGTDEENGEELQQVNNELQLVLDKERKSQGAGSGQDEADVDPQRPPRPEVKITSPEENENNQQNKDYAAVA

SEQ ID NO: 11364 - protein, 283 aa, Homo sapiens
  DOMAIN (60)..(108): Intermediate filaments proteins domain identified by eMATRIX, accession number BL00226B, p-value=7.517e-16, raw score of 23.86
  DOMAIN (60)..(173): Intermediate filament proteins domain identified by PFam, accession name filament, E-value=6.7e-09, PFam score of 37.3
  misc_feature (1)...(283): Xaa = X or * as defined in Table 2
TWQRCNLNPCLHIPVLCSLSSTMWDVLLPLDRGDLHLSCIDSSNWALFRCQSKVVLYHCVEADSKGLRSVLDELTLNKTNLELKMESQTEKLNYLRNNHEEAGTTQNEFKVSVCQYLSRYGGGGYHYKRQSFHKTQSKELMGRHRLLLTIANRHEIAELRWTLQTLELELQAQWPLVRMLQQXEPXERLTCXRXRENQEPPVQVVEEQPRANTKETRKKSSFSQPMSASTKEESQDGRRKGKXLKGRAREGKMLHQKSLGFKEYFEGRGAGPTPSGPTVTQLK

SEQ ID NO: 11365 - protein, 146 aa, Homo sapiens
  misc_feature (1)...(146): Xaa = X or * as defined in Table 2
SGKQNNPQATAKAEACTETRSQMGATETSSTFDYLGTASLKSPPHRKVVFFCFTIETSLHSNSLXILLPLHSISNIQQKTQTSNLNINLQPATAGPPSQAPPTALSELPGGRSAPEPSHAAPFPARVPPPSSGSPRPNARWAARAA

SEQ ID NO: 11366 - protein, 137 aa, Homo sapiens
  misc_feature (1)...(137): Xaa = X or * as defined in Table 2
CLGSLQPPPTRVKQFSYLCLPISFFFFLFFFGLFLRFSLCHRFXAVXLXCSLVLFSSCFLCLGFAMVFGSVGLXFSSSLECFQALFLQTFLLSFPLFFMNSNXPCIRLTEVVPRLSDALFIFKNSFSCCADAWADAW

SEQ ID NO: 11367 - protein, 41 aa, Homo sapiens
  misc_feature (1)...(41): Xaa = X or * as defined in Table 2
MTLKDVVAHACNPNTSGGRGGWITXGQFKISLANMAKPRLY

SEQ ID NO: 11368 - protein, 107 aa, Homo sapiens
  misc_feature (1)...(107): Xaa = X or * as defined in Table 2
IWYKSTHSSVIFKCEFFLQFLSQSLALSPRHECSGAIMAHCSPSLLGSSDLPASFLNFSWRXCLHYVAQPGLELLGLKXSIPPWASESAGITGLSHHAWPKYELLLF

SEQ ID NO: 11369 - protein, 153 aa, Homo sapiens
  misc_feature (1)...(153): Xaa = X or * as defined in Table 2
QGASQTTRSETSCLGIARXTFLGLFVRIERIDGNLKMLHIVEPYVTWGFPNLKSVRELILKRGQAKVKNKTIPLTDNTVIEEHLGKFGFICLEDLIHEIAFPGKHFQEISWFLRPFHLSVAHHATKNRVGFLKEMGTPGYRGERINQLIRQLN

SEQ ID NO: 11370 - protein, 74 aa, Homo sapiens
  misc_feature (1)...(74): Xaa = X or * as defined in Table 2
ISICIKININIIYACYVYIIILCIRIYLSKYILLENCIXCTILFYVIFYVYIYLHIIYILLRLCPFFIYSWSPV

SEQ ID NO: 11371 - protein, 31 aa, Homo sapiens
  misc_feature (1)...(31): Xaa = X or * as defined in Table 2
GKKXKCPTHLSHLYINPGEKSYLFETSGLNF

SEQ ID NO: 11372 - protein, 80 aa, Homo sapiens
  misc_feature (1)...(80): Xaa = X or * as defined in Table 2
LYKFQTSVPLTXFIIKALYITFYYNSRXRGYYSKFKTXSXRPGMVAHACNPSTLGGRGGRITXSQEFETSLANVAKPHVY

SEQ ID NO: 11373 - protein, 61 aa, Homo sapiens
  misc_feature (1)...(61): Xaa = X or * as defined in Table 2
CELPVTRHGAGCVCSSDTVLPXPCPFSPVSQSPSVCLSPLFSDPCEEPPYPVLESLPDCSF

SEQ ID NO: 11374 - protein, 65 aa, Homo sapiens
  misc_feature (1)...(65): Xaa = X or * as defined in Table 2
ASFLAISMSVVRVGVPFYHLFFLRQSLILSPRLVGVRXCDRGXLQPLPPGYKXFSCLGLPSSWDF

SEQ ID NO: 11375 - protein, 41 aa, Homo sapiens
  misc_feature (1)...(41): Xaa = X or * as defined in Table 2
LLAECGAHACIPSTLGDQGRQITXGQEFETSLANVVKPCLY

SEQ ID NO: 11376 - protein, 77 aa, Homo sapiens
  misc_feature (1)...(77): Xaa = X or * as defined in Table 2
AQEYRGQLRQYSETMSLQKKFKNRSAGCGATCLXSQLLRRLGWEDHLSPGGRGCSEPXSHHCSPAWVTEQDLSPCHP

SEQ ID NO: 11377 - protein, 82 aa, Homo sapiens
PRPLAHRPRKQQYRLLLRSSYQVSLAGWVVLRQKGWMGRKSHPKSPGGGQAQWLTPVIPALWETKVGGSPEVRSLRPAWPTW

SEQ ID NO: 11378 - protein, 57 aa, Homo sapiens
  misc_feature (1)...(57): Xaa = X or * as defined in Table 2
SCLSINFHLGQAQWLMPVIPALWEAKVGRSPXVRMVSISXFRDLPASASQSAFNISH

SEQ ID NO: 11379 - protein, 408 aa, Homo sapiens; identical to SEQ ID NO: 9830
  DOMAIN (293)..(394): Gag P30 core shell protein domain identified by PFam, accession name Gag_p30, E-value=3.4e-12, PFam score of 46.2

SEQ ID NO: 11380 - protein, 218 aa, Homo sapiens
  DOMAIN (61)..(112): Ribosomal protein L30 proteins domain identified by eMATRIX, accession number BL00634, p-value=6.694e-20, raw score of 34.38
  DOMAIN (56)..(108): Ribosomal protein L30p/L7e domain identified by PFam, accession name Ribosomal_L30, E-value=3.7e-11, PFam score of 41.7
  misc_feature (1)...(218): Xaa = X or * as defined in Table 2
RAPPNGLTDQQKKGKGLRFKRLESFLHDSWRQKRDKVRLRRLEVKPHALELPDKHSLAFVVRIERIDGVSLLVQRTIARLRLKKIFSGVFVKVTPHNLKMLRIVEPYVTWGFPNLKSVRELILKRGQAKVKNKTIPLTRHSQXWRSTWGKFGVICLEDLIHEIAFPGKHFQEISWFLCPFHRLSGPSCYQKXSGLPQGDGHTWAIGVNASNQLIRQLN

SEQ ID NO: 11381 - protein, 125 aa, Homo sapiens
  misc_feature (1)...(125): Xaa = X or * as defined in Table 2
IFQLGEYIFLFLFSVFEMESHSVTQAGVQWCNLSSLQPLPPRFKXFSCLSLPSSWDYRQMPPCLANFCIFSRDGVSPCWPGWSQTPDLKRSAHLGLPKCWDYRRETTAPSMFLQNLLALVPMQQR

SEQ ID NO: 11382 - protein, 161 aa, Homo sapiens
  misc_feature (1)...(161): Xaa = X or * as defined in Table 2
RAEGFCPNWCCQSNILIPCHDPGSRSAQSDWACHLGWQGSGSGQNHGVPAFGDALQLPGNTSRVGAPQGGSGRGRKDGPGNSHXAHGTGWRECYGDRSRKRNRQFWHLAPPRSEIFLIILACTLRSNGSASCPRSCFDSSFLRVPRTGRFWGSTWGVTPGI

SEQ ID NO: 11383 - protein, 26 aa, Homo sapiens
MRCASPSTSKEFSCALLLQCWLQDLG

SEQ ID NO: 11384 - protein, 234 aa, Homo sapiens
  misc_feature (1)...(234): Xaa = X or * as defined in Table 2
PLLCVLLAPPEGAVGDICKKEDAGNMPSTSEGSIYLEMAHFLRNKLAGSSVRKPDSGFLWEGALRAWSNMAAPSGGVNCEEFAEFQELLKVMRPIDDRIVHELNTTVPTPSFAGKIDASQTCKQLYESLMAAHASRDRVQKNCIAQTSAVVKNLREEREKNLDDLTLLKPTXEKSRQSXKWVQSELNVVEVVNDRSWKVFNERCPNSLQASKEXIKRDSFFFFFFLRTGSSHKS

SEQ ID NO: 11385 - protein, 11 aa, Homo sapiens
TSRLFHFSFPR

SEQ ID NO: 11386 - protein, 39 aa, Homo sapiens
  misc_feature (1)...(39): Xaa = X or * as defined in Table 2
TRDSAHAYNPSTLGGXGGRIAXVQEFKTTRAHSYTLIPT

SEQ ID NO: 11387 - protein, 66 aa, Homo sapiens
  misc_feature (1)...(66): Xaa = X or * as defined in Table 2
KHVRPYITHSLGGKKDFLILEKIWLGIVAHACNPSTFRGQGGRTAXAXEFKTSLGNIVRPCLYLKT

SEQ ID NO: 11388 - protein, 95 aa, Homo sapiens
  misc_feature (1)...(95): Xaa = X or * as defined in Table 2
FWIFLRSFYVIRKHLIGHFHPWPRVLKCXKHGGWKVHGGPGQXRQKGTGKEGRKGLRGRRELTEEGARPLFSSGPVESTQIVPLPQPPYVGAAAS

SEQ ID NO: 11389 - protein, 20 aa, Homo sapiens
ISHHPRPHEHKCAVSSAIGR

SEQ ID NO: 11390 - protein, 69 aa, Homo sapiens
  misc_feature (1)...(69): Xaa = X or * as defined in Table 2
ILVGFCCLFPPPSNKXXTHTHTHTHTHPHTHPVVTNRISLQGICRKGKQKTSQGPFTATSLSPLSDSAV

SEQ ID NO: 11391 - protein, 114 aa, Homo sapiens
  DOMAIN (9)..(60): Ribosomal protein L30 proteins domain identified by eMATRIX, accession number BL00634, p-value=5.986e-11, raw score of 34.38
TFTWPLFVRIERIDGVSFTWCREPLQDFALRKIFSGVFCKGTPQDSKMLRIVEPYVTWGFPNLKSVRELILKRGQAKVKNKTIPLTDNTVIEEHLGECYSLGVSWGRKPGSLKL

SEQ ID NO: 11392 - protein, 44 aa, Homo sapiens
  misc_feature (1)...(44): Xaa = X or * as defined in Table 2
EFSPGMGAYTRSPSTLEGHSGQITXAQELETSLANRVRPCSYMW

SEQ ID NO: 11393 - protein, 31 aa, Homo sapiens
  misc_feature (1)...(31): Xaa = X or * as defined in Table 2
YAFYRTQVPGGIRLVXCRLRVLWSNILKKQS

SEQ ID NO: 11394 - protein, 19 aa, Homo sapiens
SQHFGRPRRVDHEVGRWRP

SEQ ID NO: 11395 - protein, 19 aa, Homo sapiens
SQHFGRPRRADHEARRSRP

SEQ ID NO: 11396 - protein, 71 aa, Homo sapiens
  misc_feature (1)...(71): Xaa = X or * as defined in Table 2
HFGEAEAGWITRSGDRDHPGXNDETPSLLKIQNISRAWWQAPVVSATPEAEAGEWHEPQEARACSEAEFEP

SEQ ID NO: 11397 - protein, 82 aa, Homo sapiens
  misc_feature (1)...(82): Xaa = X or * as defined in Table 2
PPGVIYYLFVKVRLIWGNVMTVXVYMTLLSFPYPQICIYTYIKYVYILPIXNIYIYTHICIYIPLFLCLLILAIKEGAAFNV

SEQ ID NO: 11398 - protein, 70 aa, Homo sapiens
  misc_feature (1)...(70): Xaa = X or * as defined in Table 2
SVSGFWLEAMLPSLSEGQPCRLQPFIGNKSLTGWVAHACNPSTLGGXGKWITXAHEFQTSLANMMKPCLY

SEQ ID NO: 11399 - protein, 55 aa, Homo sapiens
  misc_feature (1)...(55): Xaa = X or * as defined in Table 2
KNSSXFFYFLSYLKNKNRPGAVAHTFNPNTLGGGWITXYQEFETSLANIGKPCLY

SEQ ID NO: 11400 - protein, 89 aa, Homo sapiens
  misc_feature (1)...(89): Xaa = X or * as defined in Table 2
PSASPPQVPIPALPQWTGPGRQNPLXCLHIGLCSPQPSDGPWRKACSLFQVPSHQCGRIRKKINKVHICVFTASRVRWKPKPAAANDQL

SEQ ID NO: 11401 - protein, 73 aa, Homo sapiens
MKKFSHILKKKFFCTLVPIIMLKLMENLKSQCKTKEGKYCTLAENLFHHKIHCFPSSDHRSHFSLELAVVKKL

SEQ ID NO: 11402 - protein, 113 aa, Homo sapiens
ATRSRLGKHTRRSKSSAIQAVRIISQVLRCKQRCMHCPRTIPATLQEHKSVNNPSAQQRTKTWSIHTPAPHPHPAPHPSTHQHPHPSTPAPHPSTHQHLIHPHTSISSIRTRG

SEQ ID NO: 11403 - protein, 70 aa, Homo sapiens
  misc_feature (1)...(70): Xaa = X or * as defined in Table 2
TNWKLSLCEKLYSTHFCTDHKAVLFPXCLSCFVLLCVLFICVLFVGFRFLSFCFVFTTSVISTSFFLAVS

SEQ ID NO: 11404 - protein, 53 aa, Homo sapiens
  misc_feature (1)...(53): Xaa = X or * as defined in Table 2
KKCVCVCVCVCVKCXLLKLMLVGNFRALWGSEWFLHHHLSSTNRKMLSLQGHV

SEQ ID NO: 11405 - protein, 89 aa, Homo sapiens
  misc_feature (1)...(89): Xaa = X or * as defined in Table 2
SPCDQTPVEEGMLPKFRKSLQGFSLNFHDILILPSQKXFCIRGSKTMYIWPGTVSHTCNPSTLGGQGGWITXDQEFETSLANKVKPRLY

SEQ ID NO: 11406 - protein, 101 aa, Homo sapiens
  misc_feature (1)...(101): Xaa = X or * as defined in Table 2
IFGRDGFHHVGQAGLDXTPDLKXSTHLGLPKCWDYRHEPPCLARRYFKNNNKKDNLLSHHTHKTTVNILPIFSSCTDVFLHNHDVECNVFSLDLVNIFQSC

SEQ ID NO: 11407 - protein, 37 aa, Homo sapiens
NSLGRSRHCESQADWQGTAKTPPFPAPAGKSSALCSP

SEQ ID NO: 11408 - protein, 42 aa, Homo sapiens
  misc_feature (1)...(42): Xaa = X or * as defined in Table 2
VKHLDGTQKXGCNAFNVGQSGPGPDAAPRWASRTPGGVNAGI

SEQ ID NO: 11409 - protein, 75 aa, Homo sapiens
  misc_feature (1)...(75): Xaa = X or * as defined in Table 2
KWQVTWLSFCSTFMSPSSWSSCSPPCSAQPYPAPVSCDGPPHRFPEPLLDXGRLKTYFPPPCVNWGCWGQCVISQ

SEQ ID NO: 11410 - protein, 121 aa, Homo sapiens
  misc_feature (1)...(121): Xaa = X or * as defined in Table 2
IAHITEIRNLILHSLNNPLWLEPTRIEKFSPRGKVTSLHPRVKKMSPSSPKNSHPPEEVGSASSSFLREPSPGGSQHSPYPAPSIDAMVPPYRVPXTPFGIKEDLKTKPLFWGITFLLPCV

SEQ ID NO: 11411 - protein, 135 aa, Homo sapiens
  misc_feature (1)...(135): Xaa = X or * as defined in Table 2
MDWEGSLPLVFNYCRDASLIIHPRFKGVRPRRDACLGPSPLAASPAFLGKGQTITDAELRVTLTVEDSARLHPGEINSHVAHTKPVWWSLHTDARETTHLQRTHFQQSWLVCIRPMNPAKSTVSSVRTQTXAPLP

SEQ ID NO: 11412 - protein, 144 aa, Homo sapiens
  misc_feature (1)...(144): Xaa = X or * as defined in Table 2
VPCRESPRALALPRKEMMRAXNQNKTKHDSRHCRISPVGNMDIAENNYNSFKAELGPNSSSASTPPPYNLFIASPPHTCSGLQFHSTITDAELRVTLTVEGNRMSVVRSSFLGLNQLKLAKSMMAAYSIFEEPLASLYSNFHTK

SEQ ID NO: 11413 - protein, 155 aa, Homo sapiens
  DOMAIN (48)..(113): Putative zinc finger in N-recognin domain identified by PFam, accession name zf-UBR1, E-value=8.6e-08, PFam score of 39.3
  misc_feature (1)...(155): Xaa = X or * as defined in Table 2
QLRMAGAEGAAGRQSELEPVVSLVDVLEEDEELENEACAVLGGSESEKCSYSQGSVKRQALYACSTCTPEGEEPAGICLACSYECHGSHKLFELYTKRIFRCDCGNSKFXNFGMQLLPXQSKDVNSGNKYNDNFFGLYCICKRPYPDPEDEIPDE

SEQ ID NO: 11414 - protein, 97 aa, Homo sapiens
RRFRAAAVMAPPGCPGFCPNFVLVCSFLERYGPLLDLPELPLPELERVLQAPPPDVGNGEVPKELVELHLKLMRKIGKSVTADRWEKYLIKKSKRVG

SEQ ID NO: 11415 - protein, 199 aa, Homo sapiens
  misc_feature (1)...(199): Xaa = X or * as defined in Table 2
SVAKEGVEVEVSHTCGLKWGDIRGGCEGGFGLGEKAAMRCGCSPGIVREADNLVKVSPPSVLIKKGTDLPSTVRVTRRSASVMVLTMPLAPATFLRGNCWAGGGGLVTEXNCKPDQVXGGEMIKGLXGGGVRGCGRIETXLGLARRSLGRRGEVRLVWRSGTLLPKYCAFPTVFTTARPGDPLPCLAQWVPCPWSLAHC

SEQ ID NO: 11416 - protein, 54 aa, Homo sapiens
  misc_feature (1)...(54): Xaa = X or * as defined in Table 2
SRNETESRTRCEEGRXXKDYRVEEQRLRKNWDLARPGKEQLPAFQSGNLSRQLH

SEQ ID NO: 11417 - protein, 72 aa, Homo sapiens
  misc_feature (1)...(72): Xaa = X or * as defined in Table 2
SLQPLSREDLGRSQSESLGPEFQGLWEWLPGELNSPICSGVPHRWDVAXEESWAAGSPWPGGQISGTCSKLL

SEQ ID NO: 11418 - protein, 115 aa, Homo sapiens
  misc_feature (1)...(115): Xaa = X or * as defined in Table 2
LTMPLAPATFLRGNCWAGGGGLVTEXNCKPDQVXGGEMIKGLXGGGVRGCGRIETXLGLARRSLGRRGEVRLVWRSGTLLPKYCAFPTVFTTARPGDPLPCLAQWVPCPWSLAHC

SEQ ID NO: 11419 - protein, 87 aa, Homo sapiens
DFADFGTTIKQDFRLLGQTSVDRLLQLSQGQAVKGNQLLPVSLVKRKTTLAPNTQTASPRALADSLMQLARQVSRLESGQLLLARPS

SEQ ID NO: 11420 - protein, 287 aa, Homo sapiens
LTQQHILTADTNLLCNDYGAGNGKIKSIGFVVHACIRATQEDASSHDSTIRFLICCFQTTLGAGKQNKHVKTLLKRDTPPGQGKTNGEVERNLSFPTSPGNRGSCNGWWGKTQKTGFTSLEYGRSLSVIRSFLGQVTATPSSTETGANALQSSAAFQVKNIFKAVNGVSGYFEGKPTVEPSVCGGRLESPWQTAGVSPTVQKLKSLKFDVRGQEESVWEKDEACLHPGEINSHVAHTKPIWWSLHRDAHKKKHRGHPAGSEAVEVNGGSAKAANSNGGQRAKAQLKP

SEQ ID NO: 11421 - protein, 103 aa, Homo sapiens
  misc_feature (1)...(103): Xaa = X or * as defined in Table 2
TDFSVRCKGCRTGPFLRLIFQDRIVGVELIAVCXRHGPRFSSCRLSCRRPFDKTCRLMCHQRLSGFPQEQTQRDSRCIQLLFRQRFAAASCPTHQVLLQTQYF

SEQ ID NO: 11422 - protein, 61 aa, Homo sapiens
  misc_feature (1)...(61): Xaa = X or * as defined in Table 2
KPRRSRSESLGPEFQGLWECLPGELNSPISSGVPQRWDTAXEESWAAGIPWPGGQIDFWHL

SEQ ID NO: 11423 - protein, 101 aa, Homo sapiens
  misc_feature (1)...(101): Xaa = X or * as defined in Table 2
HLGPEFQGLWEWLPGELNSPISSGVRHRWDVAXEESWAAGIPWPGGQISGTCSKLLEEEVLEEGLAAAVQAFGSSCVLEMWLGFVSQWRQGIATFFYYCTP

SEQ ID NO: 11424 - protein, 111 aa, Homo sapiens
  misc_feature (1)...(111): Xaa = X or * as defined in Table 2
KPRRSGKESESLGPEFQGLWEWLPGELDSPISSGVPHRWDVAXEESWAAGIPWPGGQISGTCSKLLGEEVLEEHLAAAVQAFGSSCVLEMWLGFVSQWRQGTATFFYYCTP

SEQ ID NO: 11425 - protein, 341 aa, Homo sapiens
SERRRGPLCLPSDSVLDCSGPPMYCGIAEPSLRRWDPQRSPLESASCRLLGCLAIPRHPNFPRPPIASSSILQIKMATAAAAAAVMAPPGCPGSCPNFAVVCSFLERYGPLLDLPELPFPELERVLQAPPPDVGNGEVPKELVELHLKLMRKIGKSVTADRWEKYLIKICQEFNSTWAWEMEKKGYLEMSVECKLALLKYLCECQFDDNLKFKNIINEEDADTMRLQPIGRDKDGLMYWYQLDQDHNVRMYIEEQDDQDGSSWKCIVRNRNELAETLALLKAQIDPVLLKNSSQQDNSSRESPSLEDEETKKEEETPKQEEQKESEKMKSEEQPMDLENRS

SEQ ID NO: 11426 - protein, 137 aa, Homo sapiens
MIKHQGKAAFPVRDRRQSFVSTDKTCLLCLSQKMKGIEIKRRERLKSGKEKVWLRDRERLEKRTILRASVFKGEKPAAGERGKVWSCDSIHVLQEKGSRPQISVLCILNHRKYSPRFSVWSLKPPSMKLEVRRKCQR

SEQ ID NO: 11427 - protein, 81 aa, Homo sapiens
RHCRYGTRARCRSANAGAMILTMKQLAIVMRVYQHQVRRSMRPGRNGARSGMSAVGAYYSSCIRVMTALQSCTGDDEAVLL

SEQ ID NO: 11428 - protein, 186 aa, Homo sapiens
  DOMAIN (64)..(111): kw TRANSCRIPTASE REVERSE II ORF2 domain identified by eMATRIX, accession number DM01354V, p-value=7.612e-36, raw score of 12.97
RQRRHILSVDPKLWRRSWTGKAAFPWCFIIAGTPLIIHPCFRGVRPCRDTWLGPSPLAASPAFLGEGQRIKYLGIQLMRDVKDLFKENYKPLLNEIKVDKHKWKNIPCSWIGRINIMKMATVPKRSFSMPSTISPLNNPPAYLCLRTFLIMKTMMAAKKMMMEVMMMMTVRPLRPSQTQPACTQVK

SEQ ID NO: 11429 - protein, 88 aa, Homo sapiens
WMKLETIILSKLLQGQKPNTACSHLQRSFSMPSTISPLNNPPAYLCLRTFLIMKTMMAAKMMMMEVMMMMTVRPLRPSQTQPACTQVK

SEQ ID NO: 11430 - protein, 258 aa, Homo sapiens
  misc_feature (1)...(258): Xaa = X or * as defined in Table 2
NLFLRPQKDQTWYHRIRLGQTKHLLKELKVYTYLLYATISFXDVXRHCRSAILAEAKETKETHFIRGPKTLAPVTDWEGSLPLVFNQCRDASLIIHPRFKGFRPRRDACLGPSPLAASPAFLGKGQRLKTDTARLPWKPPDHHRRRASGNSHSGRVQPPSRLPSWAHVECLRLFQEHGASCQWIYRSGIWRTVVFMCVRVKRPPNRLCVSNMAVYFTWVQVHYPLYENNKTQLRALRMIHVESLACGVRESSTNDNYY

SEQ ID NO: 11431 - protein, 85 aa, Homo sapiens
  misc_feature (1)...(85): Xaa = X or * as defined in Table 2
LCLWLQPPFXEXIAGQVGEGXSRNETVSRTQCEEGRXXKDYRVEEQRLRKNWDLARPGEEQLVPSSEKRDLPLRVKDQGRCPCVV

SEQ ID NO: 11432 - protein, 89 aa, Homo sapiens
GPARNRAQHWWAGTAGGPSTPSAAAGPGAKSLIARGQQGWPTAPSVGPAKPTPTRNSSWPASAVCSPGSCSRLSLHTSLPLPQKSGTCR

SEQ ID NO: 11433 - protein, 52 aa, Homo sapiens
LNTKGRLPSQSVTGARVLGPRIKCVSFVSSVPISDSSSMHDSRCCQRVTAFH

SEQ ID NO: 11434 - protein, 272 aa, Homo sapiens
MWESLELPGNIFNGFDQNADNDMDDEIQAEVISDGDEEFVGNWNKPRDLVPCILATLALTKRGQDTAQTMASEGARPKHWQLPGGVGPVGAQKSRIEVWEPLPIFRRMYGKACMSRQKFAAGAGFSWYVPVAVVGAKVHDVNLHMLSFPSKWKLHTCMKFGAVTQIVTSLGRSSCSLLLEKDPPMVLRPTSPRNISPISNLTKETRFIRGPKTPAPVTDWEGSLPLVFNHCRDASLDYSPTFQRCQTTQGRLPWSFTLSSKSCFSEGKARFN

SEQ ID NO: 11435 - protein, 29 aa, Homo sapiens
  misc_feature (1)...(29): Xaa = X or * as defined in Table 2
LSPSXAIISPVPCTYTPRWPEATEDPQKK

SEQ ID NO: 11436 - protein, 189 aa, Homo sapiens
ASGPELPGRRFRDRAPWLPARLLRGDLSVWVSLTALGPGSFCRRRVPSLAQLGHSEAAPSPDDVRWSRVPDRCPEERDRAWPPPPPPSLPPSFRRNMANNSPALTGNSQPQHQAAAAAAQQQQQCGGGGATKPAVSGKQGNVLPLWGNEKTMNLNPMILTNILSSPYFKVQLYELKTYHEVVDEIYFKD

SEQ ID NO: 11437 - protein, 80 aa, Homo sapiens
  misc_feature (1)...(80): Xaa = X or * as defined in Table 2
ESLGAQAEDYCRSGALTESLYXSSSKRKCGVGVPKQSLLYSTVXWSCGRGSLSFRPQNDRASSFQPQYEKSTEAKLPKGL

SEQ ID NO: 11438 - protein, 115 aa, Homo sapiens
  misc_feature (1)...(115): Xaa = X or * as defined in Table 2
GDRWEGKKEDLGRVALGTETRKGLMCKRMPGHAGTSDHLSILGQELFRSCRMEKLKRAICPAIWNYCRVCIGVKRHCRRKXDAXILQDLNNSCPKIDKWSEVPDVQAFFYTSVPS

SEQ ID NO: 11439 - protein, 54 aa, Homo sapiens
  misc_feature (1)...(54): Xaa = X or * as defined in Table 2
SQVLRPTQPKEHLANFKSEDRSVRPLSPSXAIKSPVTCTCTSRXPEATEDPQKK

SEQ ID NO: 11440 - protein, 54 aa, Homo sapiens
  misc_feature (1)...(54): Xaa = X or * as defined in Table 2
GLTGTTWAHAFTHWLVVLSHSTELSGCERLCGPAELGTFTLWLFXRKPFADHWP

SEQ ID NO: 11441 - protein, 45 aa, Homo sapiens
  misc_feature (1)...(45): Xaa = X or * as defined in Table 2
MVGSDFQLCWDHWLITSXXXXXXXXXXXXXXXXXXXXXXXXXXXI

SEQ ID NO: 11442 - protein, 183 aa, Homo sapiens
  misc_feature (1)...(183): Xaa = X or * as defined in Table 2
PMTHPFFFFPAEVHEPNQRQAFLVPVSQARWTASSLFSSWVSASTSPQLEELQGSTQTWHFSATCSQQPSRCVETVDPSSLLTQQGLAFSAPTGRQAQRCSARMAWNPGDPLPPPSVHPCTPHCPXGPPQQPPSASTPWGSCCSRWGHQAILGCRDRERCRGTCSSRPWLPLCLLPRFPDKWS

SEQ ID NO: 11443 - protein, 109 aa, Homo sapiens [sequence omitted]

SEQ ID NO: 11444 - protein, 41 aa, Homo sapiens
  misc_feature (1)...(41): Xaa = X or * as defined in Table 2
KVLSSDFCSVPFCVCVCVCVCVCVCVCVLTLLXNSSIYYGH

SEQ ID NO: 11445 - protein, 71 aa, Homo sapiens
  misc_feature (1)...(71): Xaa = X or * as defined in Table 2
AHNYIYFQRYIHIQTYTDTGRGMRIGMRDQKKRPGTVAHTCNPSTMGGXCRKTSQGQEFKTRLSNTVRPNL

SEQ ID NO: 11446 - protein, 113 aa, Homo sapiens
  misc_feature (1)...(113): Xaa = X or * as defined in Table 2
RRGRERKRHTHIHTHTHTANLFVSVFLYFLSFLLHCALCLSXWMXRCSANPILPTGPYASQTFMILPSCTTVISLPCHWLLFPQYSQTLYSLFTELNGQITVTSAKITYTSKI

SEQ ID NO: 11447 - protein, 190 aa, Homo sapiens
ANNSPALTGNSQPQHQAAAAAAQQQQQCGGGGATKPAVSGKQGNVLPLWGNEKTMNLNPMILTNILSSPYFKVQLYELKTYHEVVDEIYFKVTHVEPWEKGSRKTAGQTGMCGGVRGVGTGGIVSTAFCLLYKLFTLKLTRKQVMGLITHTDSPYIRALGFMYIRYTQPPKDLWDWFESFLDDEEVCQQG

SEQ ID NO: 11448 - protein, 242 aa, Homo sapiens
  misc_feature (1)...(242): Xaa = X or * as defined in Table 2
LNKGGQTDIASSQTCLVGHVESDGALHTTMIGPNEPAFLSPENNNCPIWQRERWTIIQKKKMNGMHTHRRNEAETIAGILTVQELFPRTNSLTVIDVHSHSVLFCTTIQVLISQVNHLYLPLPQAFKFPVIFIIITSTGLLFTYVRVVMYNFVISYNGKKNQNIXKVICTELYFSSFLKMICMVRKRRGQPGEGRASRELCTFYTFVLCTALLILHPIMILLEPICKKLLRKFICVYVNNTT

SEQ ID NO: 11449 - protein, 18 aa, Homo sapiens
NKTQKKLPNACKCVLYSC

SEQ ID NO: 11450 - protein, 58 aa, Homo sapiens
WKCSKIRLWLWLNKSVNLPKCVNTLKTAECYDLYLVKLFLKYGSTTARDIDIKDAEFE

SEQ ID NO: 11451 - protein, 48 aa, Homo sapiens
MTRVSSCFSDLATDRSFTHKGNNIVSSNSKIISLTWMGFEILKTQHKI

SEQ ID NO: 11452 - protein, 44 aa, Homo sapiens
  misc_feature (1)...(44): Xaa = X or * as defined in Table 2
PSPVFLAPGGVRAGNSLYPRGPGFHXPRFGPFPPPRGTKREPPF

SEQ ID NO: 11453 - protein, 83 aa, Homo sapiens
  misc_feature (1)...(83): Xaa = X or * as defined in Table 2
RGHSKQQRDIPRVLDHLMINFSFKIVTVCRSLYSFIXKQAQVKLFLHLHPIPSSHTHTHTHTHTKPTLLLTKPSDDSWVFRWC

SEQ ID NO: 11454 - protein, 802 aa, Homo sapiens
MSFLGILCKCPLQNESQEESYNAYPLPAVKVSMDWLRLRPRVFQEAVVDERQYIWPWLISLLNSFHPHEEDLSSISATPLPEEFELQGFLALRPSFRNLDFSKGHQGITGDKEGQQRRIRQQRLISIGKWIADNQPRLIQCENEVGKLLFITEIPELILEDPSEAKENLILQETSVIESLAADGSPGLKSVLSTSRNLSNNCDTGEKPVVTFKENIKTREVNRDQGRSFPPKEVRRDYSKGITVTKNDGKKDNNKRKTETKKCTLEKLQETGKQNVAVQVKSQTELRKTPVSEARKTPVTQTPTQASNSQFIPIHHPGAFPPLPSRPGFPPPTYVIPPPVAFSMGSGYTFPAGVSVPGTFLQPTAHSPAGNQVQAGKQSHIPYSQQRPSGPGPMNQGPQQSQPPSQQPLTSLPAQPTAQSTSQLQVQALTQQQQSPTKAVPALGKSPPHHSGFQQYQQADASKQLWNPPQVQGPLGKIMPVKQPYYLQTQDPIKLFEPSLQPPVMQQQPLEKKMKPFPMEPYNHNPSEVKVPEFYWDSSYSMADNRSVMAQQANIDRRGKRSPGIFRPEQDPVPRMPFEKSLLEKPSELMSHSSSFLSLTGFSLNQERYPNNSMFNEVYGKNLTSSSKAELSPSMAPQETSLYSLFEGTPWSPSLPASSDHSTPASQSPHSSNPSSLPSSPPTHNHNSVPFSNFGPIGTPHNRDRRTADRWKTDKPAMGGFGIDYLSATSFSESSWHQASTPSGTWTGHGPSMEDSSAVLMESLKSIWSSSMMHPGPSALEQLLMQQKQKQQRGQGTMNPPH

SEQ ID NO: 11455 - protein, 94 aa, Homo sapiens
  misc_feature (1)...(94): Xaa = X or * as defined in Table 2
TFKFYYRNLNFLILKKSYMYATFFIIYLYIYASFLLVLTEIFYFIIISKELLPVFIYQVYFPCFFLGYXFIYLSSKNPPYNLFILLPFYNFFNN

SEQ ID NO: 11456 - protein, 73 aa, Homo sapiens
  misc_feature (1)...(73): Xaa = X or * as defined in Table 2
KAQMSLLDTLTHPVWLLCLKLCGAVXVKLXEYFXSICNICTAICVCGVCLCIYVTMCVCVRAIERKLKEECLS

SEQ ID NO: 11457 - protein, 70 aa, Homo sapiens
  DOMAIN (5)..(40): CORE POLYPROTEIN PROTEIN GAG CONTAINS: P domain identified by eMATRIX, accession number PD02059B, p-value=1.634e-09, raw score of 24.48
  misc_feature (1)...(70): Xaa = X or * as defined in Table 2
GQRCEPPPLPPSFGXDSGXEPPFPPAFQKAGGPASPSPGPPGPHXDPTGPASEWKMATMGNRPPEMVSQA

SEQ ID NO: 11458 - protein, 72 aa, Homo sapiens; identical to SEQ ID NO: 10492

SEQ ID NO: 11459 - protein, 106 aa, Homo sapiens
  DOMAIN (53)..(81): !!!! PROTEIN ALU SUBFAMILY WARNING ENTRY NUCLEAR PHOSPHO domain identified by eMATRIX, accession number PD02454B, p-value= 6.196e-09, raw score of 11.61
  misc_feature (1)...(106): Xaa = X or * as defined in Table 2
FKHFGPFHKHHLMVLFKIQNVLFKDGNTFEVRRGGSRLSSQHFGRPRRADCLMSSVVXSQPGQCGETLSLKKNTKISQAXWHVPVVQATWEAELGGSLEPRRLRLQ

SEQ ID NO: 11460 - protein, 53 aa, Homo sapiens
  misc_feature (1)...(53): Xaa = X or * as defined in Table 2
FVFFVETGFHYVGQTGLELLTSXSARLGLPKCWDYRHEPPRPAYVEYFYSALL

SEQ ID NO: 11461 - protein, 61 aa, Homo sapiens
  misc_feature (1)...(61): Xaa = X or * as defined in Table 2
ATVWEEPPCSPPPIPRARFWGPRPPECSSRGQKPKPPAYMSPPDAWRPAWLPSSTPTYDXT

SEQ ID NO: 11462 - protein, 111 aa, Homo sapiens
  misc_feature (1)...(111): Xaa = X or * as defined in Table 2
PLSQVITGKHQKRKRHLEEGKERPEKEQSKHKRKKSYEDTDLDKDKSIRQRKREEDRVKVSSGKLKHRKKKKSPXVYPPRKKNVSTGKRKRNLLKKGQKRKCFGMSLFLGF

SEQ ID NO: 11463 - protein, 59 aa, Homo sapiens; identical to SEQ ID NO: 9592
  misc_feature (1)...(59): Xaa = X or * as defined in Table 2

SEQ ID NO: 11464 - protein, 182 aa, Homo sapiens
MPAYHSSLMDPDNKLIGNMAFLSIKSQFKGPAPRETKDRDIVDEAIYYFKANVFFKNYEIKNEADRTLIYIPLYISECLKKLQKCNSRSQGTSPVAGVIVDCEVHGSSSSHGTYVLISDLHKSLEQKESKIQQLAETIKKLEKEFKQFAQLFGKNGSFLPNIQNKLLQSLYPRLSYSMSYKA

SEQ ID NO: 11465 - protein, 35 aa, Homo sapiens
  misc_feature (1)...(35): Xaa = X or * as defined in Table 2
VFFFSLXNEADRTLIYITLYISECLKKLQKVIKLG

SEQ ID NO: 11466 - protein, 190 aa, Homo sapiens
  misc_feature (1)...(190): Xaa = X or * as defined in Table 2
NPGAAKMPAYHSSLMDPDTKLIGNMALLPIRSQFKGPAPRETKDTDIVDEAIYYFKANVFFQNYEIKNEADRTLIYITLYISECLKETAKSGNSKKPKVEERKCFTLGIHXFFPFPGEPGFFPLXRQFFAKPANKQEDEVMRAYLQQLRQETGLRLCEKVFDPQNDKPSKWWTCFVKRQFMNKSLSGPGQ

SEQ ID NO: 11467 - protein, 107 aa, Homo sapiens
  misc_feature (1)...(107): Xaa = X or * as defined in Table 2
SGPNCCEEADAQLAEESGNASHTSFTVXVRPRRACHACNPSTLGGXGGRIAXSQEFETNLGNTVRPCRNSGEVLNRKTVSIRRALRVFSPLHTARLHPAAAARAARA

SEQ ID NO: 11468 - protein, 59 aa, Homo sapiens
  misc_feature (1)...(59): Xaa = X or * as defined in Table 2
FSLGGIPPFHRRGNWVSREWPGTVAHTFNPSTLEGRGRWITXGQEFETSLTNMVKTCLY

SEQ ID NO: 11469 - protein, 226 aa, Homo sapiens
  misc_feature (1)...(226): Xaa = X or * as defined in Table 2
RTQSGNVYFASTSVPPRPGAAPGHILVLSRLQPLRAEVSRSRLLRVEYSYVKTTKLVFKGTKAKSKKKKSKDKKXQREEDEETQLDIVGIWWTVTNFGEISGTIAIEMDKGTYIHALDNGLFTLGAPHKEVDEGPSPPEQFTAVKLSDSRIALKSGYGKYLGINSDGLVVGRSDAIGPREQWEPVFKMGKMALSTSNSCFIRIHEAEDIEAKSKTAGEEEMIKIRS

SEQ ID NO: 11470 - protein, 59 aa, Homo sapiens
PSMVCSNASCWQLPPVRRFCPDLFVPEVSVCGRHLGPFPPFSAPPGLGGPGGPHSWSLG

SEQ ID NO: 11471 - protein, 69 aa, Homo sapiens
  DOMAIN (11)..(60): kw TRANSCRIPTASE REVERSE II ORF2 domain identified by eMATRIX, accession number DM01354Z, p-value=1.743e-09, raw score of 9.06
  misc_feature (1)...(69): Xaa = X or * as defined in Table 2
YVYIYKGIESRVSRAICTPSMAALVDKRWKKPKCPLMYEWINKMXYTHTMEYYTEXKRKYCSTLSHATI

SEQ ID NO: 11472 - protein, 129 aa, Homo sapiens
  misc_feature (1)...(129): Xaa = X or * as defined in Table 2
PKXWGFLPLIYKKGKDGGGTWGGDVLPSPSLGQGGGKKGWPKREGGRDLGAERKAGKCREKWKQSKMKGRSRKTGGERVKKPEKHQDTGLFPFQIGGGGLRLSRVCVPQPQVGRGSVSLAQFLSCTSSD

SEQ ID NO: 11473 - protein, 74 aa, Homo sapiens
  misc_feature (1)...(74): Xaa = X or * as defined in Table 2
CKFVYSSLLFIYSSFFICLFIFLPFAPVLIYPLAHXLCKPCSSYMSWVNIQYSIYFRHKCFRNIVQKILYSIKM

SEQ ID NO: 11474 - protein, 87 aa, Homo sapiens
  misc_feature (1)...(87): Xaa = X or * as defined in Table 2
FPSWQRDAQASLTSPAPLIYPKATPFRKRPFRRQLWNKGLIQSKLTQRLYTVAHTCNPSTLGGXGRQMTWGQKFKTSLANMVKPRLY

SEQ ID NO: 11475 - protein, 59 aa, Homo sapiens
  misc_feature (1)...(59): Xaa = X or * as defined in Table 2
FMDAQVTFKLYIYIIYTYVCTYMYIYTYVXMCEYLFIYIYARIYMYIXMHYYTYISLTP

SEQ ID NO: 11476 - protein, 187 aa, Homo sapiens
NKIPRNPTYKGCEGPLQGELQTTAQRSKRGHKQMEENSMLMGRKNEELENGHTAQEENVGNTIQDIGMGKGFMNKTPKAMATKAKTDKWDLIKLKSFCTAKETTIRVNKQSTEWEKIFAIYPSDNVLITRISKELKRIYKKISNNPIKKWAKDMNRHFSKEDIYAAKRHMKNAHHQWSSEKCKSKPQ

SEQ ID NO: 11477 - protein, 199 aa, Homo sapiens
  DOMAIN (7)..(54): kw TRANSCRIPTASE REVERSE II ORF2 domain identified by eMATRIX, accession number DM01354V, p-value=6.956e-22, raw score of 12.97
MSELPFTITTKRIKYLGIQLTRDVKDLFKENYKSLLNEIRGHKQTEEHSMLMDWKNQYHENGHTAQAICRKLKLDPFLTPYTKINSRWIKDLNVRPKTIKTLEENLGSTIQDIGMGKDFMTKTPKAMATKAKIDKWDLIKLKSFCTAEETITRVNRQPKEWEKIFAIYPSDKGLISSIYKELKQIYKKKTTPSKSGPRI

SEQ ID NO: 11478 - protein, 189 aa, Homo sapiens
MGKDFMSKSPKAMATKAKIEKWDLIKLKSFCTAKETTIRVNRQPIEWEKIFAIYSSDKGLISKIYNELKQIYKKKTNNPIKKWAKDMSRHFSKEDTYAAKKHMKKCSSSLAIREMQIKTTLRYHLTPVRMAIIKKSGNNRNTTTREYYGHFYAYQPENLEEIDKFLDKYILPRQTSGRIGIPEHTSDEL

SEQ ID NO: 11479 - protein, 174 aa, Homo sapiens
ENWLAICTKLKLDPFLTPYTKINSRWIKDLNVRPKTIKTLEENLGNTIQDIGISKNFMNKTPKAMATKAKIDKWDLIKLKSFCTGKETTIRVNRHPTEWEKIFAIYPSDKGLISRIYKELKQMYKKKNPKTPIKKWAKDMNRHFSKEDIYVANKHMKKMHHHHWPSEKCKSKPQ

SEQ ID NO: 11480 - protein, 183 aa, Homo sapiens
  misc_feature (1)...(183): Xaa = X or * as defined in Table 2
AGFSLSAQKSPGAMAXYSYVKSSKLVLKGTSKKKKSKEKKRKREEDEETQFDIVGIWXTVTNFDEISGTIAIEMDEGTYIHALDNGLFTLGAPHKERIALKSGYGKYLGINSDELVVGRSDAIGPREQWEPVFQNGACAAVFTVIGSEKQSECSLLRESRAKYHGCTHGQISSSLKQHPRWMY

SEQ ID NO: 11481 - protein, 129 aa, Homo sapiens
  misc_feature (1)...(129): Xaa = X or * as defined in Table 2
RTGSSSGLSISATCLISQRRYSEDCWNVYSLVRSGXERGSXLLSTYYVLGSLPDVFTYINSFQKTYLKXMGPGMVVHAWNPSTLGGXGRRTAXGRELETSLSNIVRPCLNNNNNNNNSNNEVNGIRKEG

SEQ ID NO: 11482 - protein, 850 aa, Homo sapiens
  DOMAIN (563)..(588): 1-AMINOCYCLOPROPANE-1-CARBOXYLATE SYNTHASE SIGNATURE domain identified by eMATRIX, accession number PR00753E, p-value=6.104e- 11, raw score of 8.01
GQRDVLTTKRDDQAHKPNGLGDARETRWKDPRSLNDLVEPNSLRCSMAVRPAQSPHKRPGKTSIFKNQYHPDLRSSKATGKENFKDKKNKYLDPCTFEEERLLYCRFLDNKLLLSRGKTYMCKEPGWFRLIFADELPRLKLGSPFQVTSYNLETRPDLKELLGSCHCGPGICEENTLGLDSDRESPAPDIERAPTLWTNPAWPPSPLSGSNAQTSRMAGSDISQPAARNQRRGRCVFCDGCGARTLTPALGSELYGEESSQSSALPPPLMRLHFSPDAGDGSLTDIAGVQQDGGESTARYPHSMRPWNPASGAATAHEEPKRPSTGRRTSRERRLQVSRQRKCDRRQGIRDGRAEAFAKCTEGGLNGFLLCKVVDPTYLAELEEAVLALGGRPSRVGFSPPGNALRRLTRGPHTTLGEVGFITAIFNKEKLKTRKARDFADFGTTIKQDFRLLGQTSVDRLLQLSQGQAVKGNQLLPVSLVKRKTTLAPNTQTASPRALADSLMQLARQVSRLESGHECESCLCPTGDLPIRGSDISVFYQSSFQDYNAYQKDKYHKAKNTLGKKVRGLVLINPQNPLGDIYSPDSLMKYLEFAKRYEFYPLRLEQCSKKAHDQFLADLASILPSNTTPLIVSDAGFKVPWYKSVEKLGWYWLSRVRGKVQYADLGAENWKPISNLHDMSSSHSKTLGYKRLTKSNPISCQILLYKSRSKGRKNQRSTRTHCHHPSPKIYSASAKEPWVLATNLPVEIRTPKQLVNIYSKRMQIEETFRDLKSPAYGLGLRHSRTSSSERFDIMLLIALMLQLTCGLRGGSSRVNWREENGDYTYVERVKIPLDHGTLLIMEGATQADWQ

SEQ ID NO: 11483 - protein, 322 aa, Homo sapiens
  misc_feature (1)...(322): Xaa = X or * as defined in Table 2
RKNWGLRKIPWSSLKQEQNLPESFGSKKAFFGSTWRKKDGEPEFQGSLGCPLLKARPLLSQLPLLRAISTRKPGQTWKNKEHHLSDREFVFKEPQQVVRRAPEPRVIDREGVYEISLSPTGVSRVCLYPGFVDVKEADWILEQLCQDVPWKQRTGIREDITYHQPRLTAWYGELPYTYSRITMEPNPHWHPVLGTLXNRIEENTGHTFNSLLCNLYRNEKDSVDWHSDDEPSLGRCPIIASLSFGATRTFEMRKKPPPEENGDYTYVERVKIPLDHGTLLIMEGATQADWQHRSAQKNTTLREPRVNLTFRTVYPDPRGAPW

SEQ ID NO: 11484 - protein, 220 aa, Homo sapiens
  misc_feature (1)...(220): Xaa = X or * as defined in Table 2
RIHFPRVSGPSQSNPKFAVASRGFFSLSLSSAQPDPLPPPLGEALALSLHPVPRRSTETVAGDSSELQLGLRSPQQPLAGLAFLARLFLLFPPPXRCKSKPNXNDRRRSSVDSQIHLVGRESAHPLAGLRVCVSLPLLARCFGQVLQGVPGLWIPSPGGSAGVSGRRREERHMGVVVMRVRVEARVSSXESKISRALRXSTHLGLPKCWDYRREPPCPAH

SEQ ID NO: 11485 - protein, 114 aa, Homo sapiens
  misc_feature (1)...(114): Xaa = X or * as defined in Table 2
QHSTKNSGGWAQTPYGSSQISVCVYIHTYIHIYIFFFFFLVETESHSVTQAGVQWHNLSSLXPPPPGFKRFFCFSLPSSWDYRRTPPHPANFCIFSRDGVSPYWPGWSRTPDLR

SEQ ID NO: 11486 - protein, 158 aa, Homo sapiens
  misc_feature (1)...(158): Xaa = X or * as defined in Table 2
NLILNVTWPTQLAKQERLHLRLKTSVVWVVRKEKPTRFPRLGAVSHCPQLLILQLVLSPSTSKTLPXEPPDSESPXPKRKGKPSWGRTGAPNLHSPPLSPEGPPWAAWNPLKLPPPQHSSGAVPSSACSPWAGSVPAAPPSVCYLIYWNLHSQALAHR

SEQ ID NO: 11487 - protein, 135 aa, Homo sapiens
  DOMAIN (96)..(117): BETA-1 ADRENERGIC RECEPTOR SIGNATURE domain identified by eMATRIX, accession number PR00561B, p-value=4.844e-09, raw score of 5.52
  misc_feature (1)...(135): Xaa = X or * as defined in Table 2
RRRCGGCFPALPGSPHKPHEQLPPLCPRVPVAXPSSSAEHPDPRAGKGGGRGLXAGSSPGAVPHPPSIPGRKNRMGSLEGRGAPAPRRGGSGAGAAEASLTWPGSTGPAPGSHGCSAGVGPSRWAWSLPQRCGRC

SEQ ID NO: 11488 - protein, 142 aa, Homo sapiens
  misc_feature (1)...(142): Xaa = X or * as defined in Table 2
KRGSRGWFFSTFHHLWGRLQAHLLGPTPALQPCDPGAGARTARPGQTASAAPAPLPPRRGAGAPPLRDLARVPAPPCCAQRAPPSSSQPGRNQXXAASGPWRPPRQAEKEASAGKRRDRPVGARKTAAERDRRGQASGGQTR

SEQ ID NO: 11489 - protein, 59 aa, Homo sapiens [sequence omitted]

SEQ ID NO: 11490 - protein, 90 aa, Homo sapiens
  DOMAIN (24)..(79): Ribosomal protein S27e proteins domain identified by eMATRIX, accession number BL01168, p-value=7.652e-19, raw score of 15.74
  DOMAIN (33)..(87): Ribosomal protein S27 domain identified by PFam, accession name Ribosomal_S27e, E-value=1.2e-19, PFam score of 78.7
  misc_feature (1)...(90): Xaa = X or * as defined in Table 2
TSMYVGPVAKDLLHPSAEEENRKHTMKRLAQSPNSYFMEAKSPXCYKITTAFTHAQTVGWWVGCSTVLCQPTGGEARLTERCAFTRNQRF

SEQ ID NO: 11491 - protein, 126 aa, Homo sapiens
GPPASVRTDSGHPRRRAEGAVSTRTQADPLAPCGPPRPAGGQGAYARLLLLQCLLAAARPSSADGSAPDSPFTSPPLREEIMSNNFSLESHNISLTEHSSMPVENNITLERPSNVNLTCQFTTSGD

SEQ ID NO: 11492 - protein, 63 aa, Homo sapiens
  misc_feature (1)...(63): Xaa = X or * as defined in Table 2
AQWHTSIVLAAWEAAAAGLLEPRSXSRLKCTMIIPINSHCTPAWQHMRPCLLKKNFSNSFISK

SEQ ID NO: 11493 - protein, 32 aa, Homo sapiens
MNTRFLTCVPGWVKNDNYSIVCIDFPLVVIAI

SEQ ID NO: 11494 - protein, 52 aa, Homo sapiens
  misc_feature (1)...(52): Xaa = X or * as defined in Table 2
HLCMCVRVCVCACMCTLLHLFSNGFIIXCFCTSTXAIHVMGXVAIKMYINDP

SEQ ID NO: 11495 - protein, 273 aa, Homo sapiens
  misc_feature (1)...(273): Xaa = X or * as defined in Table 2
FHHLEDSIIEIFDAFLTLRKKKRKKKHNGNMPIFSKLFHMVNPMKISTSLFFXHKYMIVPISPQSHQYSSNGLSVLFLPVYRHSLFFMILSTLSFRCLANILSHSLFILLGLLINRSLSMXSVLLIYXYXSYILLQYLLTVLEFFSFHIXVFSLLRILFFFKIFTFSIWMPLSQSYLLRHSVFTDVPYLISYILICVDLFLNTLFCSIGLFILGLTQHCLNSSSFIIIVIXQSISSHLVQXDCLCLHLCIFCALSCATKTKNKDVEIFIGLTM

SEQ ID NO: 11496 - protein, 32 aa, Homo sapiens
  misc_feature (1)...(32): Xaa = X or * as defined in Table 2
GLYLHRPIFPHDKLLVQLSCPFHRXTHRGTES

SEQ ID NO: 11497 - protein, 30 aa, Homo sapiens
GSTRHTHTHTHTHTHTHTQKERERERERER

SEQ ID NO: 11498 - protein, 311 aa, Homo sapiens
  misc_feature (1)...(311): Xaa = X or * as defined in Table 2
NADNSLENFCRKSASCDLEQRRFIIRFIKLRRGSFSERKQQHSVTRKYSFIQNWVLEKDNKALNTRVIYNRFLFMMYKIKQNTDDGDCRLLCSYHVLDRHCCKGSTCIDPFFLMTNYWCNYHAHFIDEHTEAQRARNGKQGDECEVGGIESRRRSGNSGARYVHDSSPPTSGIHSNARPSVRLFLATLSKIAFLLTVSLLYEMTVHIYGEPLPRRQRITQLLEGVGTLNGSVASVDPVFRNQQLHLATGSLMASSSFCFSVLREIIGQSLIMKTLPXITHTHTHTHSHTHTHTERERERERETEREERVKF

SEQ ID NO: 11499 - protein, 121 aa, Homo sapiens
  misc_feature (1)...(121): Xaa = X or * as defined in Table 2
VLTLGVSPLYVSKGFWFFLLLFSXTMFSHSPTWAILESWSSLARFSGMSGEPQMTPIGLQYLAXGXRPRNPTLVTFTEISXVYFFILPLMSQXMCLMHLFPLPQTFCQILQLYFFMAHIST

SEQ ID NO: 11500 - protein, 116 aa, Homo sapiens
  misc_feature (1)...(116): Xaa = X or * as defined in Table 2
PRKAELRIFEKVSVTDAMAEDMEKLRPRLKKVHIRELVLAISIMPKTHKPMLTLRVTWREMLRPRDLKXEVEGGCRRCSSSPRVDPPGGRREFRGGVRVRGRGSAPPGGPGLSAML

SEQ ID NO: 11501 - protein, 78 aa, Homo sapiens
  DOMAIN (3)..(30): Protamine P1 proteins domain identified by eMATRIX, accession number BL00048, p-value=2.913e-09, raw score of 6.39
  misc_feature (1)...(78): Xaa = X or * as defined in Table 2
CLRRINPCSPRCRRPAWRRRRPGPRTRRRTDSXIRPKSGAASHPPGGAEGIPRGCQSTRSRTRRRPEAPASRPCCLRI

SEQ ID NO: 11502 - protein, 71 aa, Homo sapiens
RVMSHRKVSAPRRGSLGFLPRKRSSRHRGKVNSLPKEDLVHPLHLTCYLEDSPAFADIVRNVYKTGGSAMN

SEQ ID NO: 11503 - protein, 95 aa, Homo sapiens
  misc_feature (1)...(95): Xaa = X or * as defined in Table 2
FFPESELAQPEKRFXVPGKGRGLSPRRLLPPRCRRPAWRRRRPGPRTRRRTDSXIRPKSGAASHPPGGAEGIPRGCQGTRSRTRRRPEAPASRPC

SEQ ID NO: 11504 - protein, 77 aa, Homo sapiens
MPSSSAQLLLPHEVSPVLSCQLCFLKITRVCSYLWATVILGLDYCNSLIPCLVSYFLLSLSLPCISVVFRTQILLHY

SEQ ID NO: 11505 - protein, 113 aa, Homo sapiens
  misc_feature (1)...(113): Xaa = X or * as defined in Table 2
LTTLVFAGTPGKKRRGGNQWRXSPHYSCSGGTGGRPRPAFSLPGAPGQSGQISQSDWRRGPCSXSSGWCNSCHPGWPGLVRGGMTSXWSYSXATGPGPGYKAIPGASXRSTSL

SEQ ID NO: 11506 - protein, 102 aa, Homo sapiens
  misc_feature (1)...(102): Xaa = X or * as defined in Table 2
PLLPAHPPPWSLPVTSXPRCGSPQRTSSWNRHSHRPAXSLPCLGFAGTPGKKRRGGNQWRXSPHYSCSGGTGGRPAPAFSLPGAPGQSGQISQSDWRRGPCS

SEQ ID NO: 11507 - protein, 181 aa, Homo sapiens
  misc_feature (1)...(181): Xaa = X or * as defined in Table 2
PHLSPAGTPLLPAHPPPWSLPVTSXPRCGSPQRTSSWNRHSHRPAXSLPCLGFAGTPGKKRRGGNQWRXSPHYSCSGGTGGRPAPAFSLPGAPGQSGQISVPPCRVPPLLQSRAAGPSPSSFSKWELYCSHHILPPLLYAHCQESLSNTQQRLEASLSSLNASEPTTAKCPHGTAACLLGD

SEQ ID NO: 11508 - protein, 84 aa, Homo sapiens
MVARDSRCRSRALVGTGVPVEVLATGKSHDQLVLLNRDAGTGASLALGATALAQDAASFQALARASPCLWGASAKQRFPLELYC

SEQ ID NO: 11509 - protein, 78 aa, Homo sapiens
  misc_feature (1)...(78): Xaa = X or * as defined in Table 2
VNMERKKDLTESSLPAVPTKVPGMRMKLSXTLKTSLATRCQTLSRLCSPPTNQRLSQQEGVGVGEKGELRIYLAMWIK

SEQ ID NO: 11510 - protein, 61 aa, Homo sapiens
  misc_feature (1)...(61): Xaa = X or * as defined in Table 2
VNMERKKDLTESSLPAVPTKVPGMRMKLSXTLKTSLATRCQTLSRLCSPPTNQRLSQQEGV

SEQ ID NO: 11511 - protein, 75 aa, Homo sapiens
  misc_feature (1)...(75): Xaa = X or * as defined in Table 2
GRVLLVLFCFFETESRSVAXAGVQWRHRGSLQPXASVSYELEAAVGYGGTTALQPGRQSRALYLKTKTKNFLNLS

SEQ ID NO: 11512 - protein, 68 aa, Homo sapiens
  misc_feature (1)...(68): Xaa = X or * as defined in Table 2
GWVFTMLARMVLQXNHLNPGGGGCSELRSHHCTPAWATEXDSVSKKKEKEKKMRNETKTKWTCSPFIT

SEQ ID NO: 11513 - protein, 143 aa, Homo sapiens; identical to SEQ ID NO: 8541
  DOMAIN (21)..(43): Globins profile domain identified by eMATRIX, accession number BL01033A, p-value=2.929e-17, raw score of 16.94
  DOMAIN (10)..(143): Globin domain identified by PFam, accession name globin, E- value=4.3e-55, PFam score of 196.4

SEQ ID NO: 11514 - protein, 70 aa, Homo sapiens
  misc_feature (1)...(70): Xaa = X or * as defined in Table 2
ARWADWLPLGIANCPRAHLAYLETWELEAHWKRTIVNFCVCVCLCMXVCLVALRLFCSSGMHHSFNRALQ

SEQ ID NO: 11515 - protein, 79 aa, Homo sapiens
  misc_feature (1)...(79): Xaa = X or * as defined in Table 2
IRCTQAFALTSVVSGPGTVAHASNPSTLGGXGGQITXPREFKTSLGKMAKPCLYKNLGRHGDLCLQARLLQLAEVEGFT

SEQ ID NO: 11516 - protein, 96 aa, Homo sapiens
  misc_feature (1)...(96): Xaa = X or * as defined in Table 2
ATEPVWPPCLWPQPLCAKDCRGVARPXCVRPPKASLVLSPSSAGNASSIFMDYKCLSPCPFKQFLSSPPQSTEPSPACELGLINVNLSSRPSLPSR

SEQ ID NO: 11517 - protein, 67 aa, Homo sapiens
  misc_feature (1)...(67): Xaa = X or * as defined in Table 2
LILETGSVCVFQAGVKXLCTSVIIAHYSLDLLGSSNPPTSDSRVPGCGDVHLYSQVDAAANLVVVAA

SEQ ID NO: 11518 - protein, 127 aa, Homo sapiens
  misc_feature (1)...(127): Xaa = X or * as defined in Table 2
CRSKWGLASILWLKSFLLGHHLGGDGFKAXFKFHSKFTVLASSKCLLLVGFXSHNYGXVRIHLFIYXIFIHFXKDFKSMFPRLVLSSWPQAILPPWPPKVLGLQVLANCIQPMFHFNWLKSSKWLRI

SEQ ID NO: 11519 - protein, 143 aa, Homo sapiens; identical to SEQ ID NO: 8541
  DOMAIN (21)..(43): Globins profile domain identified by eMATRIX, accession number BL01033A, p-value=2.929e-17, raw score of 16.94
  DOMAIN (10)..(143): Globin domain identified by PFam, accession name globin, E- value=4.3e-55, PFam score of 196.4

SEQ ID NO: 11520 - protein, 170 aa, Homo sapiens
  DOMAIN (31)..(53): Globins profile domain identified by eMATRIX, accession number BL01033A, p-value=2.929e-17, raw score of 16.94
  DOMAIN (9)..(82): Globin domain identified by PFam, accession name globin, E- value=6.9e-22, PFam score of 80.8
  misc_feature (1)...(170): Xaa = X or * as defined in Table 2
APSPDAMGHFTEEDKATITSLWGKVNVEDAGGETLGRLLVVYPWTQRFFDSFGNLSSASAIMGNPKVKAHGKKVLTILGEMPXKHLDDLKGTFAQAXSELALVDKLHVGSXRTFKLPGEMLLVTRFWQSHFRQKNFTPEGARLSWAERWVTWSWPVALVLPRLPLKLNCP

SEQ ID NO: 11521 - protein, 119 aa, Homo sapiens
  misc_feature (1)...(119): Xaa = X or * as defined in Table 2
TTGTLESLCSNNACFGALLPHPPAPGEXRPWSXHFTRYLGPLNRCAWEGGRGXTGPGLPSLGKALVEGIPSESPGPTVSHPCCSPRPDPDQSAASLHQVPPPTVHCSHLTLPMGWPGPQ

SEQ ID NO: 11522 - protein, 118 aa, Homo sapiens
  DOMAIN (2)..(26): HMW KININOGEN SIGNATURE domain identified by eMATRIX, accession number PR00334B, p-value=8.457e-09, raw score of 8.69
HTHTHTHTHTHTHTHTHTHTHTHTHTHTHTHTHTHTHTHTHTHTHTHTHTHTHTHTHTHTHTHTHTHTHTHTHTHTHTHTHTHTHTHTHTHTHTHTHTHTHTHTHTHTHTHTHTHTHT

SEQ ID NO: 11523 - protein, 126 aa, Homo sapiens
  DOMAIN (2)..(26): HMW KININOGEN SIGNATURE domain identified by eMATRIX, accession number PR00334B, p-value=8.457e-09, raw score of 8.69
HTHTHTHTHTHTHTHTHTHTHTHTHTHTHTHTHTHTHTHTHTHTHTHTHTHTHTHTHTHTHTHTHTHTHTHTHTHTHTHTHTHTHTHTHTHTHTHTHTHTHTHTHTHTHTHTHTHTHTHTHTHTHT

SEQ ID NO: 11524 - protein, 43 aa, Homo sapiens
  misc_feature (1)...(43): Xaa = X or * as defined in Table 2
FSHFWPPEFLRDXMWLGVVAHACNPSTLGGRGRWITXGQESET

SEQ ID NO: 11525 - protein, 162 aa, Homo sapiens
  DOMAIN (36)..(53): BETA HAEMOGLOBIN SIGNATURE domain identified by eMATRIX, accession number PR00814A, p-value=1.000e-22, raw score of 12.94
  DOMAIN (9)..(125): Globin domain identified by PFam, accession name globin, E- value=1.4e-26, PFam score of 97.2
  misc_feature (1)...(162): Xaa = X or * as defined in Table 2
APSPDAMGHFTEEDKATITSLWGKVNVEDAGGETLGRLLVVYPWTQRFFDSFGNLSSASAIMGNPKVKAHGKKVLTSLGDAIKHLGXSQGAPFAQAXSELHCDKPAMWDPENFKAPGEMLLVTRFGQSHFRAKNFTPEGCKASWAERWVTGVASALVPSRYH

SEQ ID NO: 11526 - protein, 81 aa, Homo sapiens
  DOMAIN (2)..(26): HMW KININOGEN SIGNATURE domain identified by eMATRIX, accession number PR00334B, p-value=8.457e-09, raw score of 8.69
HTHTHTHTHTHTHTHTHTHTHTHTHTHTHTHTHTHTHTHTHTHTHTHTHTHTHTHTHTHTHTHTHTHTHTHTHTHTHTHTH

SEQ ID NO: 11527 - protein, 153 aa, Homo sapiens
  DOMAIN (2)..(26): HMW KININOGEN SIGNATURE domain identified by eMATRIX, accession number PR00334B, p-value=8.457e-09, raw score of 8.69
HTHTHTHTHTHTHTHTHTHTHTHTHTHTHTHTHTHTHTHTHTHTHTHTHTHTHTHTHTHTHTHTHTHTHTHTHTHTHTHTHTHTHTHTHTHTHTHTHTHTHTHTHTHTHTHTHTHTHTHTHTHTHTHTHTHTHTHTHTHTHTHTHTHTHTHTH

SEQ ID NO: 11528 - protein, 106 aa, Homo sapiens
  DOMAIN (4)..(28): HMW KININOGEN SIGNATURE domain identified by eMATRIX, accession number PR00334B, p-value=6.657e-09, raw score of 8.69
HTHTHTHTHTHTHTHTHTHTHTHTHAHTHTHTHTHTHTHTHTHTHTHTHTHTHTHTHTHTHTHTHTHTHTHTHTHTHTHAHTHTHTHTHTHTHTHTHTHTHTHTHT

SEQ ID NO: 11529 - protein, 92 aa, Homo sapiens
  DOMAIN (1)..(25): HMW KININOGEN SIGNATURE domain identified by eMATRIX, accession number PR00334B, p-value=8.457e-09, raw score of 8.69
THTHTHTHTHTHTHTHTHTHTHTHTHTHTHTHTHTHTHTHTHTHTHTHTHTHTHTHTHTHTHTHTHTHTHTHTHTHTHTHTHTHTHTHTHTH

SEQ ID NO: 11530 - protein, 114 aa, Homo sapiens
  DOMAIN (2)..(26): HMW KININOGEN SIGNATURE domain identified by eMATRIX, accession number PR00334B, p-value=8.457e-09, raw score of 8.69
HTHTHTHTHTHTHTHTHTHTHTHTHTHTHTHTHTHTHTHTHTHTHTHTHTHTHTHTHTHTHTHTHTHTHTHTHTHTHTHTHTHTHTHTHTHTHTHTHTHTHTHTHTHTHTHTHT

SEQ ID NO: 11531 - protein, 64 aa, Homo sapiens
  DOMAIN (1)..(25): HMW KININOGEN SIGNATURE domain identified by eMATRIX, accession number PR00334B, p-value=8.457e-09, raw score of 8.69
THTHTHTHTHTHTHTHTHTHTHTHTHTHTHTHTHTHTHTHTHTHTHTHTHTHTHTHTHTHTHTP

SEQ ID NO: 11532 - protein, 55 aa, Homo sapiens
  DOMAIN (2)..(26): HMW KININOGEN SIGNATURE domain identified by eMATRIX, accession number PR00334B, p-value=8.457e-09, raw score of 8.69
HTHTHTHTHTHTHTHTHTHTHTHTHTHTHTHTHTHTHTHTHTHTHTHTHTHTHTH

SEQ ID NO: 11533 - protein, 113 aa, Homo sapiens
  DOMAIN (2)..(26): HMW KININOGEN SIGNATURE domain identified by eMATRIX, accession number PR00334B, p-value=8.457e-09, raw score of 8.69
HTHTHTHTHTHTHTHTHTHTHTHTHTHTHTHTHTHTHTHTHTHTHTHTHTHTHTHTHTHTHTHTHTHTHTHTHTHTHTHTHTHTHTHTHTHTHTHTHTHTHTHTHTHTHTHTH

SEQ ID NO: 11534 - protein, 129 aa, Homo sapiens
  DOMAIN (2)..(26): HMW KININOGEN SIGNATURE domain identified by eMATRIX, accession number PR00334B, p-value=8.457e-09, raw score of 8.69
HTHTHTHTHTHTHTHTHTHTHTHTHTHTHTHTHTHTHTHTHTHTHTHTHTHTHTHTHTHTHTHTHTHTHTHTHTHTHTHTHTHTHTHTHTHTHTHTHTHTHTHTHTHTHTHTHTHTHTHTHTHTHTHTH

SEQ ID NO: 11535 - protein, 66 aa, Homo sapiens
  misc_feature (1)...(66): Xaa = X or * as defined in Table 2
MXCVVCXVCVECVECXACGVCGXCGXWCVWXXWSXWXVCVCVCVCVCVCVCVCVCVCVCVCVCVCV

SEQ ID NO: 11536 - protein, 109 aa, Homo sapiens
  DOMAIN (34)..(68): Tubulin subunits alpha beta, and gamma proteins. domain identified by eMATRIX, accession number BL00227A, p-value=5.135e- 26, raw score of 24.55
  DOMAIN (34)..(108): Tubulin/FtsZ family domain identified by PFam, accession name tubulin, E-value=5.2e-23, PFam score of 89.9
GPASNRALGFVVLLETRMVSAVSDPPTSTTGSTMCECISIHVGQAGVQMGNACWELYCLEHDIQPSGTMPSHKALWSSDNSFNTFFRETQPGRHVPGLSVDLEPAVIAQ

SEQ ID NO: 11537 - protein, 132 aa, Homo sapiens
  DOMAIN (7)..(31): HMW KININOGEN SIGNATURE domain identified by eMATRIX, accession number PR00334B, p-value=7.429e-09, raw score of 8.69
TAHTNTAHTHTHTHTHTHTHTHTHTHTHTHTHTHTHTHTHTHTHTHTHTHTHTHTHTHTHTHTHTHTHTHTHTHTHTHTHTHTHTHTHTHTHTHTHTHTHTHTHTHTHTHTHTHTHTHTHTHTHTHTHTHTH

SEQ ID NO: 11538 - protein, 78 aa, Homo sapiens
  DOMAIN (7)..(31): HMW KININOGEN SIGNATURE domain identified by eMATRIX, accession number PR00334B, p-value=7.600e-09, raw score of 8.69
TPHPALHTLHTHTHTHTHTHTHTHTHTHTHTHTHTHTHTHTHTHTHTHTHTHTHTHTHTHTHTHTHTHTHTHTHTHTH

SEQ ID NO: 11539 - protein, 49 aa, Homo sapiens
  DOMAIN (16)..(40): HMW KININOGEN SIGNATURE domain identified by eMATRIX, accession number PR00334B, p-value=6.829e-09, raw score of 8.69
  misc_feature (1)...(49): Xaa = X or * as defined in Table 2
MELFCNGYNEEVSKNTHTHTHTHTHTHTHTHTHTXTHTHTHTXTHXWXL

SEQ ID NO: 11540 - protein, 185 aa, Homo sapiens
  misc_feature (1)...(185): Xaa = X or * as defined in Table 2
RCRREMGSLSSHSVMVDSGFLWPCWRGPGSRTSNTVENRNPPPPPRHPLGQLFILFQSLSLHLSLSCLSLSTSFFQSLFLNLSVSLCQSLPSPSLCFSIPLSNTHTHTHTHTHTHTHTHTHTHTESGRCXSVLFFPPCPYLYHYRXGXGVGSAALSLPTPHYEMTVFKGNLLYLPAVSIVSRVNL

SEQ ID NO: 11541 - protein, 74 aa, Homo sapiens
  misc_feature (1)...(74): Xaa = X or * as defined in Table 2
EIRTLSRSSQSLWRRDVRWISGSCLKGHASDHQLCQHXCTHTHTHTRTHTHTHTHTHTHTHTHTHTHTHTPKMA

SEQ ID NO: 11542 - protein, 91 aa, Homo sapiens
  DOMAIN (6)..(82): Protein of unknown function DUF122 domain identified by PFam, accession name DUF122, E-value=7.1e-19, PFam score of 76.1
EELEALRRQRLAELQAKHGDPGDAAQQEAKHREAEMRNSILAQVLDQSARARVSEQGLIEILKKVSQQTEKTTTVKFNRRKVMDSDEDDDY

SEQ ID NO: 11543 - protein, 39 aa, Homo sapiens
  misc_feature (1)...(39): Xaa = X or * as defined in Table 2
VSEQGLIEILKKXCQLTEKTSTVKFNRRKVMDSDEDDDY

SEQ ID NO: 11544 - protein, 59 aa, Homo sapiens
MAAEELEALRRPEAGRAAGPNTGDPGDAAPTGSQSTGQAEMRNSILAQVSGSSPAPGPG

SEQ ID NO: 11545 - protein, 29 aa, Homo sapiens
  misc_feature (1)...(29): Xaa = X or * as defined in Table 2
LSKXCNKYTIHTHTHTHTHTHTLLNQPLK

SEQ ID NO: 11546 - protein, 129 aa, Homo sapiens
  misc_feature (1)...(129): Xaa = X or * as defined in Table 2
ENTVFIGLLKQQTRNIILPLKIFCLRLKIPPLTMPSPPPSPFRKSPDLVPAHTPKEGRLWPWPGPPGGPSKAAHARRPLSTCQDXPPQREILPGPQPTSPTHCRMSREGRSGGTGARACQLPLLRPLAS

SEQ ID NO: 11547 - protein, 132 aa, Homo sapiens
CFRDMAFNFGAPSGTSGTAAATAAPAGGFGGFGTTSTTAGSAFSFSAPTNTGTTALGGLFSQPTQAPTQSNQLINTASALSAPTLLGDERDAILAKWNQLQAFWGTGKGYFNNNIPPAEFTQENPFCRFKAV

SEQ ID NO: 11548 - protein, 80 aa, Homo sapiens
  misc_feature (1)...(80): Xaa = X or * as defined in Table 2
INFFFFXIIDRFSLCHPGWTAVAQSRLTATLLPSRFKRFLCLSLPSSWEYRPLPPYPANFCSKLLICLSTFYYKDCGNSA

SEQ ID NO: 11549 - protein, 45 aa, Homo sapiens
HATRHIRFHRIMAPSYPSRCFWYSRLPFMLVSLKVYLKGFKYSFT

SEQ ID NO: 11550 - protein, 1184 aa, Homo sapiens; identical to SEQ ID NO: 10715
  DOMAIN (1083)..(1131): Ribosomal protein L30e proteins domain identified by eMATRIX, accession number BL00709A, p-value=1.000e-40, raw score of 24.45
  DOMAIN (406)..(1002): von Willebrand factor type A domain identified by PFam, accession name vwa, E-value=3.2e-125, PFam score of 429.4

SEQ ID NO: 11551 - protein, 73 aa, Homo sapiens
  DOMAIN (7)..(55): Ribosomal protein L30e proteins domain identified by eMATRIX, accession number BL00709A, p-value=7.462e-31, raw score of 24.45
  misc_feature (1)...(73): Xaa = X or * as defined in Table 2
KKSLESINSRLQLVMKSGKYVLGYKQTLKMIRQGKAKLVILANNWPALRXSKRLNVLRLPRIHRERIYRSVNL

SEQ ID NO: 11552 - protein, 143 aa, Homo sapiens
  DOMAIN (77)..(119): Ribosomal protein L30e proteins domain identified by eMATRIX, accession number BL00709B, p-value=4.750e-28, raw score of 21.58
  misc_feature (1)...(143): Xaa = X or * as defined in Table 2
VGGRPRSLRQGRWVARKEDEKSRWESINSRLQLVMKSGKYCPWGTSETLKMIRQGKAKLVILANNCPALRKSEIEYYAMLEKTGVHHYSGNNIELGTACGKYYRVCTLAIIDSGGLXPFIXKACPEQTWXKEDEKSRWESINS

SEQ ID NO: 11553 - protein, 50 aa, Homo sapiens
  misc_feature (1)...(50): Xaa = X or * as defined in Table 2
HGQINQMEVNLPMDRKVXTHTHTHTHTHTHTHTHSSTSCPYTLKRNKVKS

SEQ ID NO: 11554 - protein, 113 aa, Homo sapiens
  misc_feature (1)...(113): Xaa = X or * as defined in Table 2
SPIIPLPITTINILVYVLLAFLCIYIHTXIYLYIIFFFTNIVSYYTYCFITCVFHLIYIVNIIVYSLKNFTDTTCSLWKIRSYRYAKRKYNCSKSHLPEINAFTLWQVSFQTL

SEQ ID NO: 11555 - protein, 117 aa, Homo sapiens
  misc_feature (1)...(117): Xaa = X or * as defined in Table 2
LNVSEGNIWVKLCHELQHGPLNSSPFLILLSHSEKINRASIMLKRKYKLINNYILSAFNPPPGKIHTHTHIHTHTHTHTHTESQKVKSTXEITXIFPQQYTNLCQREEHCYFLSHSE

SEQ ID NO: 11556 - protein, 41 aa, Homo sapiens
  misc_feature (1)...(41): Xaa = X or * as defined in Table 2
CVNGLVLGQAQLLRPVIPALXEAEAGRLLEPRSSRSAWANM

SEQ ID NO: 11557 - protein, 61 aa, Homo sapiens
  misc_feature (1)...(61): Xaa = X or * as defined in Table 2
MGVWLNILTPTFGDQSAKLGTLQFKPARHEFSQSGRTSFPIMPSPRLPDVAXENPNGSLDP

SEQ ID NO: 11558 - protein, 85 aa, Homo sapiens
MAFNFGAPSGTSGTAAATAAPAGFGGLETANSTASGFNFGGFGLTANPAVNFNIGNFGVSTTSATPFNFGNSLASAEKQVLYEQQ

SEQ ID NO: 11559 - protein, 179 aa, Homo sapiens
RLDLPSNLPGLILTSEHCNEGVQLPLSSLSQDSKLVYIQLLWDNINLHQEPREPLYVSWRNFNSEKKSSLLSEEQQETSTLVETIRQSIQHNNVLKPINLLSQQMKPGMKRQRSLYREILFLSLVSLGRENIDIEAFDNEYGIAYNSLSSEILERLQKIDAPPSASVEWCRKCFGAPLI

SEQ ID NO: 11560 - protein, 63 aa, Homo sapiens
  misc_feature (1)...(63): Xaa = X or * as defined in Table 2
TAVVFLNKLQLHFXKFLSEAFDNEYGIAYNSLSSEILERLQKIDAPPSASVEWCRKCFGAPLI

SEQ ID NO: 11561 - protein, 90 aa, Homo sapiens
  misc_feature (1)...(90): Xaa = X or * as defined in Table 2
GSHRRCSFITNYVHLYIFTLYIYIYIYIYIYIYIYTQMHSPPAHSVTXLYGNTSLSATLERPVTPAVVAVGFRVRSEKQLIVYEGARPRG

SEQ ID NO: 11562 - protein, 177 aa, Homo sapiens
  misc_feature (1)...(177): Xaa = X or * as defined in Table 2
NVAVASLSGAHTWKKQSQVCFVSAGLETSMEAAIGDLSVFPGSLTQLEGIQGLVEPVQAXASSWSSRXAAHSQGPGHPSYHRSHLPKPTQRNPERSQMEAPSPKPLDQPVPEKRHRGASAMRRRKPISFGFLAEMLHVLAVREIELTNCPHPEPNLATGKMTWLRSSSGFCESNRVT

SEQ ID NO: 11563 - protein, 54 aa, Homo sapiens
  misc_feature (1)...(54): Xaa = X or * as defined in Table 2
AFEFKRIDILTFKSSFAGSLXEXLHTHTHTHTHTHTNTCFLTVMKELSNHPGNK

SEQ ID NO: 11564 - protein, 82 aa, Homo sapiens
  misc_feature (1)...(82): Xaa = X or * as defined in Table 2
SGVLGRAALLKPPSRARSSGGSSLSSILRLSSPGPLSSPSLPCPTSQDRGIPFQTFHLNVALTXAAHEMDWREPCVKTRTGS

SEQ ID NO: 11565 - protein, 149 aa, Homo sapiens; identical to SEQ ID NO: 8286
  DOMAIN (33)..(55): Globins profile domain identified by eMATRIX, accession number BL01033A, p-value=3.250e-20, raw score of 16.94
  DOMAIN (9)..(149): Globin domain identified by PFam, accession name globin, E- value=4.6e-57, PFam score of 203.0

SEQ ID NO: 11566 - protein, 242 aa, Homo sapiens
  DOMAIN (86)..(108): STREPTOPAIN (C10) CYSTEINE PROTEASE FAMILY SIGNATURE domain identified by eMATRIX, accession number PR00797F, p-value=7.848e- 09, raw score of 12.40
YLVSCFRDMAFNFGAPSGTSGTAAATAAPGGFGGFGTTSTTAGSAFSFSAPTNTGTTGLFGGTQNKGFGFGTGFGTTTGTSTGLGTGLGTGLGFGGFNTQQQQQTAVGYSCMPSNKDEDGLVVLVFNKKETEIRSQQQQLVESLHKVLGGNQTLTVNVEGTKTLPDDQTEVVIYVVERSPNGTSRRVPATTLYAHFEQANIKTQLQQLGVTLSMTRTELSPAQIKQLLQNPPAGMFLESQSS

SEQ ID NO: 11567 - protein, 163 aa, Homo sapiens
  DOMAIN (36)..(58): Globins profile domain identified by eMATRIX, accession number BL01033A, p-value=3.250e-20, raw score of 16.94
  DOMAIN (30)..(62): Globin domain identified by PFam, accession name globin, E- value=0.0052, PFam score of 14.9
  misc_feature (1)...(163): Xaa = X or * as defined in Table 2
NSTDSERTHPWLLSPADKTNVKAAWGKVGAHAGEYGAEALERMFLSFPTTKTYFPHFDLSHGFAQVKGHGKKVADALTKAVAHVDDMPKRRCPPXSDLHAHKLRVGPGSTFKLLSHLPCLGEPWAAHLPRPSFNPWRLQRLPWGQSFLGFLLKHRCLNLPNTR

SEQ ID NO: 11568 - protein, 101 aa, Homo sapiens
  DOMAIN (64)..(87): Cu-Zn-SUPEROXIDE DISMUTASE FAMILy SIGNATURE domain identified by eMATRIX, accession number PR00068A, p-value=8.500e-11, raw score of 13.56
  DOMAIN (19)..(101): Copper/zinc superoxide dismutase (SODC) domain identified by PFam, accession name sodcu, E-value=6.4e-20, PFam score of 67.5
  misc_feature (1)...(101): Xaa = X or * as defined in Table 2
ISCFLCSETLSNFALFLKESNGPVKVWGSIKAMTENLHGFHVHEFGDNTAGRVLCFFLECIWELXFIIXLFFLLLINRCTSAGPHFNPLSRKHGGPKDEER

SEQ ID NO: 11569 - protein, 80 aa, Homo sapiens
  DOMAIN (42)..(78): Copper/Zinc superoxide dismutase proteins domain identified by eMATRIX, accession number BL00087C, p-value=4.706e-32, raw score of 20.18
  DOMAIN (5)..(80): Copper/zinc superoxide dismutase (SODC) domain identified by PFam, accession name sodcu, E-value=1.2e-48, PFam score of 160.4
CFFIIRHVGDLGNVTADKDGVADVSIEDSVISLSGDHCIIGRTLVVHEKADDLGKGGNEESTKTGNAGSRLACGVIGIAQ

SEQ ID NO: 11570 - protein, 210 aa, Homo sapiens
  DOMAIN (159)..(186): Cu-Zn-SUPEROXIDE DISMUTASE FAMILy SIGNATURE domain identified by eMATRIX, accession number PR00068D, p-value=1.563e-09, raw score of 12.35
  misc_feature (1)...(210): Xaa = X or * as defined in Table 2
SPAASGGFPLQSLEPRTLGRGLSDFGDRSPVCVLKGRRPKCRGIINFEQKCRESNGPVKVWGSHIKGLTXKALHGFHVHEFGDNTARLYQVQGPHFNPLSQKTTVGPKDEESHCXDLGQCDCLTKNGVADVSIEDFVNLTLQGDHCIIGRTLVVPWKKPDDLGPKVGNEESSKTGNAGKSVWPCGVIGIARINIPLGCSLRPPKLICVSC

SEQ ID NO: 11571 - protein, 73 aa, Homo sapiens
  DOMAIN (23)..(56): LacY family proton/sugar symporters proteins domain identified by eMATRIX, accession number BL00896A, p-value=5.241e- 09, raw score of 14.92
QQTLVYSAACVICFPHFHLLSPNPILFFFFFAFLFFFFSFYLLYLVCLFLVASQVRKLFTERFPLCICTKMNV

SEQ ID NO: 11572 - protein, 158 aa, Homo sapiens
  DOMAIN (4)..(155): Ubiquinol-cytochrome C reductase complex 14k domain identified by PFam, accession name UCR_14kD, E-value=3.5e-35, PFam score of 130.3
  misc_feature (1)...(158): Xaa = X or * as defined in Table 2
MAGKQAVSASGKWLMGIRKWYYNAAEFNKLGLMRDDTIYEDEDVKEAIRRLPENLYNDRMFRIKRALDLNLKHQILPKEQWTKYEEGLCCSSSALCFLLRXKDQPIECPSRSQEELLXSKLSPLXTAFETXAKENFYLEPYLKEVIRERKEREEWAKK

SEQ ID NO: 11573 - protein, 25 aa, Homo sapiens
ENFYLEPYLKEVIRERKEREEWAKK

SEQ ID NO: 11574 - protein, 130 aa, Homo sapiens
  DOMAIN (22)..(130): Ubiquinol-cytochrome C reductase complex 14k domain identified by PFam, accession name UCR_14kD, E-value=1.9e-07, PFam score of 31.8
  misc_feature (1)...(130): Xaa = X or * as defined in Table 2
RPPTTTKFAAARQMAGKQAVXSTQAKGLNGIFKKWYYNAARIQNKLGLMRDDTIYEDEDVKRSPXEDFPENLYNDRMFRHXEGHWTLNLKHQILPKEQWTNFEEKNFYLEPYLKEVLFRERKEREEWAKK

SEQ ID NO: 11575 - protein, 104 aa, Homo sapiens
ATVLLDYHLNYLKEVDQLRLERLQIDEQLRQIGASSRPPPNRTDKEKSYVTDDGQGMGRGSRPYRNRGHGRRGPGYTSESDHRDELSDWSLAPTEEERESFLRR

SEQ ID NO: 11576 - protein, 112 aa, Homo sapiens
  DOMAIN (81)..(108): Protamine P1 proteins domain identified by eMATRIX, accession number BL00048, p-value=1.738e-14, raw score of 6.39
GSGTSAKAFRSIWGPLPPVHRHGSPRSSVQRDGPGLGTGEPRVYIRNKVANTGVPGAPGPSIGGVTAPATDYCHRIAPILAARRRRRRRRRRRRRRRRGGGGGVAGGGGGGG

SEQ ID NO: 11577 - protein, 226 aa, Homo sapiens
AREGSALRVAGVTYLVSCFRDMAFNFGAPSGTCGTAAATAAPAGNTFLLFGGGFGGFGTTSTTAGSAFSFSAPTNTGTTGLFGGTQNKGFGFGTGFGTTTGTSTGLGTGLGTGLGFGGFNTQQQQQQTTLGGLFSQPTQAPTQSNQLINTASALSAPTLLGDERDAILAKWNQLQAFWGTGKGYFNNNIPPVEFTQENPFCRFKAVGYSCMPSNKDEDGLVVLVFK

SEQ ID NO: 11578 - protein, 39 aa, Homo sapiens
LSRMERLRSFNNNNFFFLFFFCFLKCGGLVLFFESFFFK

SEQ ID NO: 11579 - protein, 657 aa, Homo sapiens
  DOMAIN (359)..(371): KH domain proteins family of RNA binding proteins domain identified by eMATRIX, accession number PF00013, p-value=2.059e-10, raw score of 5.78
  DOMAIN (287)..(397): KH domain identified by PFam, accession name KH-domain, E- value=1.1e-07, PFam score of 39.0
DGGARARGRAAARRRRRPRRRRRRRRRRRRRRRRRRRRRRRRLGLERPQPTSRGRAPGASRAEEKMEELVVEVRGSNGAFYKAFVKDVHEDSITVAFENNWQPDRQIPFHDVRFPPPVGYNKDINESDEVEVYSRANEKEPCCWWLAKVRMIKGEFYVIEYAACDATYNEIVTIERLRSVNPNKPATKDTFHKIKLDVPEDLRQMCAKEAAHKDFKKAVGAFSVTYDPENYQLVILSINEVTSKRAHMLIDMHFRSLRTKLSLIMRNEEASKQLESSRQLASRFHEQFIVREDLMGLAIGTHGANIQQARKVPGVTAIDLDEDTCTFHIYGEDQDAVKKARSFLEFAEDVIQVPRNLVVIGKNGKLIQEIVDKSGVVRVRIEAENEKNVPQEEEIMPPNSLPSNNSRVGPNAPEEKKHLDIKENSTHFSQPNSTKVQRGMVPFVFVGTKDSIANATVLLDYHLNYLKEVDQLRLERLQIDEQLRQIGASSRPPPNRTDKEKSYVTDDGQGMGRGSRPYRNRGHGRRGPGYTSGTNSEASNASETESDHRDELSDWSLAPTEEERESFLRRGDGRRRGGGGKGQGGRGRGGGFKGNDDHSRTDNRPRNPREAKGRTTDGSLQNTSSEGSRLRTGKDRNQKKEKPDSVDGQQPLVNGVP

SEQ ID NO: 11580 - protein, 705 aa, Homo sapiens
  DOMAIN (369)..(381): KH domain proteins family of RNA binding proteins domain identified by eMATRIX, accession number PF00013, p-value=2.059e-10, raw score of 5.78
  DOMAIN (295)..(407): KH domain identified by PFam, accession name KH-domain, E- value=7.2e-13, PFam score of 56.2
TASAGGGGDGGAAARGRAAARRRRRRRRRRRRRRRRRRRRRRRRRRRRRRLGLERPQPTSRGRAPGASRAEEKMEELVVEVRGSNGAFYKAFVKDVHEDSITVAFENNWQPDRQIPFHDVRFPPPVGYNKDINESDEVEVYSRANEKEPCCWWLAKVRMIKGEFYVIEYAACDATYNEIVTIERLRSVNPNKPATKDTFHKIKLDVPEDLRQMCAKEAAHKDFKKAVGAFSVTYDPENYQLVILSINEVTSKRAHMLIDMHFRSLRTKLSLIMRNEEASKQLESSRQLASRFHEQFIVREDLMGLAIGTHGANIQQARKVPGVTAIDLDEDTCTFHIYGEDQDAVKKARSFLEFAEDVIQVPRNLVGKVIGKNGKLIQEIVDKSGVVRVRIEAENEKNVPQEEEIMPPNSLPSNNSRVGPNAPEEKKHLDIKENSTHFSQPNSTKVQRVLVASSVVAGESQKPELKAWQGMVPFVFVGTKDSIANATVLLDYHLNYLKEVDQLRLERLQIDEQLRQIGASSRPPPNRTDKEKSYVTDDGQGMGRGSRPYRNRGHGRRGPGYTSGTNSEASNASETESDHRDELSDWSLAPTEEERESFLRRGDGRRRGGGGRGQGGRGRGGGFKGNDDHSRTDNRPRNPREAKGRTTDGSLQIRVDCNNERSVHTKTLQNTSSEGSRLRTGKDRNQKKEKPDSVDGQQPLVNGVP

SEQ ID NO: 11581 - protein, 140 aa, Homo sapiens; identical to SEQ ID NO: 8052
  DOMAIN (87)..(99): Globins profile domain identified by eMATRIX, accession number BL01033B, p-value=7.000e-14, raw score of 13.81
  DOMAIN (14)..(140): Globin domain identified by PFam, accession name globin, E- value=1.3e-37, PFam score of 135.6

SEQ ID NO: 11582 - protein, 151 aa, Homo sapiens
  DOMAIN (97)..(109): Globins profile domain identified by eMATRIX, accession number BL01033B, p-value=7.000e-14, raw score of 13.81
  DOMAIN (12)..(151): Globin domain identified by PFam, accession name globin, E- value=6.7e-43, PFam score of 154.0
RPRRPQREPTMVLSPADKTNVKAAWGKVGAHAGEYGAEALERCFCLSHHQDLLSHFDLSHGSSQVKGHGKKVADALTNAVGHVDDMPNALSALSDLHAHKLRVDPVNFKLLSHCLLVTLAAHLPAEFTPAVHAFLDKFLASVSTVLTSKYR

SEQ ID NO: 11583 - protein, 202 aa, Homo sapiens
  DOMAIN (27)..(40): ALPHA HAEMOGLOBIN SIGNATURE domain identified by eMATRIX, accession number PR00612A, p-value=4.273e-09, raw score of 8.64
  misc_feature (1)...(202): Xaa = X or * as defined in Table 2
EFHRLRENPPWCLSPADKTKAQRPPRLKLGAHAGEYGGEPLERMFLSFPTTKDLLPALRPXATVSAQGXRAHGKKVADALTNAVAHVDDMPQTALSAPERTCNGAQAFGWDPVQLSSSXSHLPCLGEPWAAHLPRPSSTPGGCKASLGTKFPGLFVEAPLLEPSKLPLKLGSLRVGHCFFAPLGLPPSPSSPSCTRTPVVFE

SEQ ID NO: 11584 - protein, 46 aa, Homo sapiens
  misc_feature (1)...(46): Xaa = X or * as defined in Table 2
PDHHNWSQXTTTGAQRQTXKRTVKEVXSAHNEAMCFGTCASDCLYR

SEQ ID NO: 11585 - protein, 127 aa, Homo sapiens
  misc_feature (1)...(127): Xaa = X or * as defined in Table 2
MVLMPVVSAIPEAEAKSSLIENDVCLSAKENHKSKRAITRTAERFPTESPHDYPRKTARTGLRHAQQASLPNWSTPLAARIAPVPPAANPQGVLLKSAGPHLLLLARTTTCNRXVPIASPQTTHRME

SEQ ID NO: 11586 - protein, 503 aa, Homo sapiens
  DOMAIN (207)..(339): Dihydrodipicolinate reductase domain identified by PFam, accession name DapB, E-value=0.018, PFam score of -61.3
MGSKLSQPLSPGVAWQLHVILRRTDDWMDGRAVVTLMIRMCFSVYTMYRRAANVWLSSGMGAASRQAELDGMPAINAKRVTGSCARMRCCLSENLLSAIETGTYRQSGRERKHQRWCSDGFEFCCDNGEDCVSRSRWTAVIVRHCMGGHYRRLQQRVNGSKELAEAFEHYNEWHPHSARVIARHGNICGSGLVMGEVPENAMHDANIRVAIAGAGGLWAARLIQAALALEGVHWALRWSVKDLLYWAATRRYRAKQLDAVKDDFDVFIDFTRPKRWVNVMLKLLEKAAKVMGATPISKLLKHIIDIKLIAVRHRTGNGRGDRPRPDKDLKDCAVYSREGHTVNVCLAPLVLPPCVQVVSMATTAGFTTDTLPAGRSFCRYCFYVQPYRRLRRVNGRWPEGDPILLLFKQGNLTNRQYPANHAMFQDNGFQQLCRVGRYGGNCGMIISTSGSTAFQQAATIPVEIQLLMNMPHSKYLTCGNFASTVSIRPRYADCVDRAKLHPQ

SEQ ID NO: 11587 - protein, 113 aa, Homo sapiens
  misc_feature (1)...(113): Xaa = X or * as defined in Table 2
PGSMIPLSVSHSTGDDGRSLPKRRSTAPSMTSVYCFNCERCLVSCSLLLLSSLGPPCLAVLLAPFFAPFFXVFLLCVVVAGLPALLLLLVSSLLFLVLLSFCAASACFGFLSV

SEQ ID NO: 11588 - protein, 153 aa, Homo sapiens
HRRPLYPAGIARMTRGDRTRTGCTRPKGSRTGGAVGAAMQEIIGSVDHIKFDLEIAVEQQLGAQPLPFPGMDKTPDSQAPISTVWGLLLPSLGLRSSLPRIFGPLRLFKESGAAVCEFFLKAACGKGGMCPFRHISGEKTVVCKHCLRGLCMN

SEQ ID NO: 11589 - protein, 71 aa, Homo sapiens
  misc_feature (1)...(71): Xaa = X or * as defined in Table 2
YCNVSFGANLERAXTSFSALFIDLQPPGYRTTTSKHKVSSSLIKGHVLLDHSFHDLNTQLWISTNAFRFGN

SEQ ID NO: 11590 - protein, 92 aa, Homo sapiens
  misc_feature (1)...(92): Xaa = X or * as defined in Table 2
QQKCAVNLHSFLPITKLCRLFASCRAARCCSHLTSQPVTAXLAGKVNPLPLGNLWECDTKAGSQAMRTHLSITWRAVMQLPVINTTYQRGKR

SEQ ID NO: 11591 - protein, 121 aa, Homo sapiens
RTDAVLFDQVVSQRVEVRLFRHSLVERGVKYSNVFVFQLWERFQSFFDTDQVSRVVQRCKRSCIFDTLNNRLIDHYGAGILFAAVYDTVTDSSQLRRQFWFLCQNSINDKVERFAVSGACT

SEQ ID NO: 11592 - protein, 185 aa, Homo sapiens
TIIRQPLHWRRRKIVAEAAFHRSQHDVLYCFTVEAAGSDRPVQCLTITAVQRERDTQSLSVITAELEPVRAPSLIAFFHGHSACMCPISTARYSRFSLKQQRILAHDPVNTFGIDRRHTIKFCLSAKQRPYPTITIRWQLSDNMVYTEKHIRIISVTTAAAIHPVIGSSENDVQLRTRHPETTAD

SEQ ID NO: 11593 - protein, 149 aa, Homo sapiens
  misc_feature (1)...(149): Xaa = X or * as defined in Table 2
HPVTLGDNTYRTHIKQLIKGEVLFLHFTPDAVDVFRTTMTLPLXRLQLSSQRADDQRTLRCSVRGRDAVHAAVWQFVCIRLDEVTEAVIFQFPFQLSDSETVSQRCVDVGTLFCRQYTFIFRRIFYFAQMSNTLRLFDDYAEEIIDHRQ

SEQ ID NO: 11594 - protein, 60 aa, Homo sapiens
  misc_feature (1)...(60): Xaa = X or * as defined in Table 2
IASPGWSXRQECSSRSCAQCCCQSTTTCRHAKQRSLALAHKPLAKLAGNGITPRLRQICR

SEQ ID NO: 11595 - protein, 173 aa, Homo sapiens
TIIRQPLHWRRRKIVAEAAFHRSQHDVLYCFTVEAAGSDRPVQCLTITAVQRERDTQSLSVITAELEPVRAPSLIAFFHGHSACMCPFRWRYSRFSLKQQRILAHDPVNTFGIDRRHTIKFCLSAKQRPYPTITIRWQLSDNMVYTEKHIRIISVTTAAAIHPVIGSFPIPGQ

SEQ ID NO: 11596 - protein, 378 aa, Homo sapiens
  DOMAIN (79)..(99): w LOW TRANSPOSASE SAPA 12K domain identified by eMATRIX, accession number DM00475B, p-value=1.300e-15, raw score of 12.12
  DOMAIN (12)..(105): Transposase domain identified by PFam, accession name Transposase_8, E-value=3.2e-38, PFam score of 140.4
MIDVLGPEKRRRRTTQEKIAIVQQSFEPGMTVSLVARQHGVAASQLFLWRKQYQEGSLTAVAAGEQVVPASELAAAMKQIKELQRLLGKKTMENELLKEAVEYGRAKKWIAHAPLLPGDGDRHTDDTDVLLRIHHVIGELPTYGYRRVWALLPRQAELDGMPAINAKRVYRIMRQNALLLERKPAVPPSKRAHTGRVAVKESNQRWCSDGFEFCCDNGERLRVTFALDCCDREALHWAVTTGGFNSETVQDVMLGAVERRFGNDLPSSPVEWLTDNGSCYRANETRQFARMLGLEPKNTAVRSPESNGIAESFVKTIKRDYISIMPKPDGLTAAKNLAEAFEHYNEWHPHSALGYRSPREYLRQRACNGLSDNRCLEI

SEQ ID NO: 11597 - protein, 173 aa, Homo sapiens; identical to SEQ ID NO: 11595

SEQ ID NO: 11598 - protein, 106 aa, Homo sapiens
  misc_feature (1)...(106): Xaa = X or * as defined in Table 2
EVWRPARRSRDVSCSRSHAYYVVPGTADWLWPSXRPSTTGVCGXPVTWRWLEGQWTPHLGRVLQEDSDSPTFPSALGIQETRPEPLKSPREVPTSGRTGVFHYPVA

SEQ ID NO: 11599 - protein, 269 aa, Homo sapiens
  DOMAIN (190)..(206): Ank repeat proteins domain identified by eMATRIX, accession number PF00023A, p-value=7.000e-10, raw score of 16.03
  DOMAIN (154)..(252): Ank repeat domain identified by PFam, accession name ank, E- value=3.9e-20, PFam score of 80.3
DGTMEDSEAVQMATALIEQRLAQEEENEKLRGDARQKLPMDLLVLEDEKHHGAQSAALQKVKGQERVRKTSLDLRREIIDVGGIQNLIELRKKRKQKKRDALAASHEPPPEPEEITGPVDEETFLKAAVEGKMKVIEKFLADGGSADTCDQFRRTALHRASLEGHMEILEKLLDNGATVDFQDRLDCTAMHWACRGGHLEVVKLLQSHGADTNVRDKLLSTPLHGAVRTGQVEIGEHFLSLGLENNARNREGDTALHDAGRVNRYPILQ

SEQ ID NO: 11600 - protein, 250 aa, Homo sapiens
  DOMAIN (138)..(158): w LOW TRANSPOSASE SAPA 12K domain identified by eMATRIX, accession number DM00475B, p-value=1.300e-15, raw score of 12.12
  DOMAIN (71)..(164): Transposase domain identified by PFam, accession name Transposase_8, E-value=3.2e-38, PFam score of 140.4
MRDFAGCPRSSVSETGNRRPNAGHNQEWNGGKDETHDTNQSRTRHYGVRNFSTIPNYFEGNPKWGPEKRRRRTTQEKIAIVQQSFEPGMTVSLVARQHGVAASQLFLWRKQYQEGSLTAVAAGEQVVPASELAAAMKQIKELQRLLGKKTMENELLKEAVEYGRAKKWIAHAPLLPGDGERTDDWMDGRRSRHTDDTDVLLRIHHVIGELPTYGYRRVWALLRRQAELDGMPAINAKRVYRIMRQNAPVA

SEQ ID NO: 11601 - protein, 240 aa, Homo sapiens
  DOMAIN (108)..(172): Integrase core domain identified by PFam, accession name rve, E-value=6.7e-05, PFam score of 20.9
VFSGPFSGVGFFPFSGLCPCELSATVLEVAPPLLPGNRMSSRITMLSESCQRMVIVGYGRCFADRQNLMVCLRSMPNVFTGSCARMRCCLSENLPVPPSKRAHTGRVAVKESNQRWCSDGFEFCCDNGERLRVTFALDCCDREALHWAVTTGGFNSETVQDVMLGAVERRFGNDLPSSPVEWREGVFVRNIDEEFGNESAQTGMLHHQLDPSVEGELHQNTGSTACCRADSTHISHWRFM

SEQ ID NO: 11602 - protein, 136 aa, Homo sapiens
  misc_feature (1)...(136): Xaa = X or * as defined in Table 2
TVITTGIGRPFSMESVFALNALQNSMMFTPCXPRAGPTGGLGCTSFSDEPILDGWPPQSSQLMIRMCFSVYTMLSESCQGMVIVGYGRCFADRQNLMVCLRSMPNVFTGSCARMRCCLSENLLYRHRNGHIQAEWP

SEQ ID NO: 11603 - protein, 173 aa, Homo sapiens; identical to SEQ ID NO: 11595

SEQ ID NO: 11604 - protein, 887 aa, Homo sapiens
  DOMAIN (637)..(715): 5'-nucleotidase domain identified by PFam, accession name 5_nucleotidase, E-value=2.6e-30, PFam score of 111.2
EGRTKEHERKKERKTTTTKDNERKNRTEQKRKKAQNRKKERKQRHEQTEDRKKERTTERTKEGRKDGRKEGTEGTEGRKERKNTTGNLQTINQKVQTPLAFVTAGEDQDNYLEPVWRKRTTNHRHGGGDSAFEIKPVLLRAFRTTKVIFMTQTFIPGKDAALEDSIARFQQKLSDLGFQIEEASWLNPVPNVWSVHIRDKECALCFTNGKGATKKAALASALGEYFERLSTNYFFADFWLGETIANGPFVHYPNEKWFPLTENDDVPEGLLDDRLRAFYDPENELTGSMLIDLQSGNEDRGICGLPFTRQSDNQTVYIPMNIIGNLYVSNGMSAGNTRNEARVQGLSEVFERYVKNRIIAESISLPEIPADVLARYPAVVEAIETLEAEGFPIFAYDGSLGGQYQPLHWRRRKIVAEAAFHRSQHDVLYCFTVEAAGSDRPVQCLTITAVQRERDTQSLSVITAELEPVRAPSLIAFFHGHSACMCPFRWRYSRFSLKQQRILAHDPVNTFGIDRRHTIKFCLSAKQRPYPTIPYVGSSPIHGVYGEAHPYHQCDDCGGIHPVIGSSENDVQLRTRHRRQRLTKLTPHPRAIRARKTLGGDSCTMTNCGSEEAVATNALQPMPKSQTHLGELQSLLRTYNFDVIDGVNYQIDVTQPARYDGECQMINANAERIKNLTFNGKPIDPNAMFLVATNNYRAYGGKFAGTGDSHIAFASPDENRSVLAAWIADESKRAGEIHPAADNNWRLAPIAGDKKLDIRFETSPSDKAAAFIKEKGQYPENKMVNTTVSLVLLKYPMVPCEFAVAPGAFENQVGKQSREAQLKTVANIESSFRSAPVSETREARFRQTIWGKESSYCLCGKTGQQKYLSPVPVDAWVGNTTLHPIDR

SEQ ID NO: 11605 - protein, 790 aa, Homo sapiens
  DOMAIN (414)..(434): w LOW TRANSPOSASE SAPA 12K domain identified by eMATRIX, accession number DM00475B, p-value=1.300e-15, raw score of 12.12
  DOMAIN (544)..(696): Integrase core domain identified by PFam, accession name rve, E-value=9.9e-27, PFam score of 96.4
MSKSANRIKPKKNTQINNTQSKATRTYNTNTQYKPGKCRTQGWIPVCRAYRQYDRGRDQRSSEYSRRRLRPSAPTSAKSHRRRHRWSVYQQSGHSDAGFSSRERFLNLASPWHCHIVEENGHREGGNLPFGDSVVANTVDKETNFFIAQRMTITFFTNNFLCEKQAAGALTVAVTQRFQQACQQAGSAKAVVTRICPVSTEQFICNGEIFLRIFRSTHAARRFETNGFFYAHITDHFHHDARAFRRRVHSHFTGRGFDEVRTRFDGDFRRFTDQRFVFQFAGFDDHFQQYIRCRASLFTGFHQVKTNLLVTRHQRAVREHNVNFISTVGDCRTGFCQRDVDVVVTVWEVGYRSDTDFGVPCSFRVCEHSDNAMIDTDRRVCRAEFGLMTQAITSRRCSSKQVVPASELAAAMKQIKELQRLLGKKTMENELLKEAVEYGRAKKWIAHAPLLPGDGERTDDWMDGRRSRHTDDTDVLLRIHHVIGELPTYGYRRVWALLRRQAELDGMPAINAKRVYRIMRQNALLLERKPAVPPSKRAHTGRVAVKESNQRWCSDGFEFCCDNGERLRVTFALDCCDREALHWAVTTGGFNSETVQDVMLGAVERRFGNDLPSSPVEWLTDNGSCYRANETRQFARMLGLEPKNTAVRSPESNGIAESFVKTIKRDYISIMPKPDGLTAAKNLAEAFEHYNEWHPHIRYRNQDDHELQITHGTRFYVELCGESLPAEGTGLTPLRTHARFQVDHNALVSRRVVRSCTCCLYQVPKLRSPDTIAQTALSLAISYTHTASGH

SEQ ID NO: 11606 - protein, 184 aa, Homo sapiens
TIIRQPLHWRRRKIVAEAAFHRSQHDVLYCFTVEAAGSDRPVQCLTITAVQRERDTQSLSVITAELEPVRAPSLIAFFHGHSACMCPFRWRYSRFSLKQQRILAHDPVNTFGIDRRHTIKFCLSAKQRPYPTITIRWQLSDNMVYTEKHIRIISVTTAAAIHPVIGSSENDVQLRTRHPETTGD

SEQ ID NO: 11607 - protein, 101 aa, Homo sapiens
  misc_feature (1)...(101): Xaa = X or * as defined in Table 2
HRQLVIVFQQPLVSGFHEAELSLDDAKWVLHPGPDAGFHVFDVDGRFVLAXCCFKVLTLPGRSAISQSTPPRPAPRAVAPLGSRHRLRQIAPLHAADYPAD

SEQ ID NO: 11608 - protein, 128 aa, Homo sapiens
  misc_feature (1)...(128): Xaa = X or * as defined in Table 2
PTALAAFSRRIVRITFLPVGDPGFHQSGSLRLSNPDALQIQPACRIFSSALITSVFACSVHEGEXLPVDPGIIRALLHRXRXKAESACAVPCIXAWTDREYGCHNRRKSGVILRRTDDWMDGRRSRHT

SEQ ID NO: 11609 - protein, 601 aa, Homo sapiens
  DOMAIN (551)..(565): w LOW TRANSPOSASE SAPA 12K domain identified by eMATRIX, accession number DM00475A, p-value=4.900e-11, raw score of 16.26
  DOMAIN (99)..(158): DEAD/DEAH box helicase domain identified by PFam, accession name DEAD, E-value=7.6e-05, PFam score of 18.2
MTRDNPVIPRFIHRREVVFIGQENGGIQNARFIAALFFQHGVNLCQRVGGLLKGIGVEVFRYTSVVERVVVDYYIRPAGFSIDTNDRGSVTDDFAPDGQLAKAIPGFKPREPQRQMAVAVTQAIEKGQPLVVEAGTGTGKTYAYLAPALRAKKKVIISTGSKALQDQLYSRDLPTVSKALKYTGNVALLKGRSNYLCLERLEQQALAGGDLPVQILSDVILLRSWSNQTVDGDISTCVSVAEDSQAWPLVTSTNDNCLGSDCPMYKDCFVVKARKKAMDADVVVVNHHLFLADMVVKESGFGELIPEADVMIFDEAHQLPDIASQYFGQSLSSRQLLDLAKDITIAYRTELKDTQQLQKCADRLAQSAQDFRLQLGEPGYRGNLRELLANPQIQRAFLLLDDTLELCYDVAKLSLGRSALLDAAFERATLYRTRLKRLKEINQPGYSYWYECTSRHFTLALTPLSVADKFKELMAQKPGSWIFTSATLSVNDDLHHFTSRLGIEQADSCSIGNSYVFRLVIGEQMIDVLGPEKRRRRTTQEKIAIVQQSFEPGMTVSLVARQHGVAASQLFLWRKQYQEGSFICCRPPENRLFLPLNLLPP

SEQ ID NO: 11610 - protein, 477 aa, Homo sapiens
EARRNWGAMGKARRSPPGHHRHCEGCFNRHCHIPVEPNTSCLVISCHLLCGATFHMCKEAEHQLLCPLEQVPCLNSEYGCPLSMYRHKLAKHLQACPASVVCCSMEWNRWPNVDSETTLHENIMKETPSEECLDTALALQDQKVLFRSLKMVELFPETREATEEEPTMNGETSVEEMGGAVGGVDIGLVPHGLSATNGEMAELSQEEREVLAKTKEGMDLVKFGQWENIFSKEHAASALTNSSASCESKNKNDSEKEQISSGHNMVEGEGAPKKKEPQENQKQQDVRTAMETTGLAPWQDGVLERLKTAVDAKDYNMYLVHNGRMLIHFGQMPACTPKERDFVYGKLEAQEVKTVYTFKVPVSYCGKRARLGDAMLSCKPSEHKAVDTSDLGITVEDLPKSDLIKTTLQCALERELKGHVISESRSIDGLFMDFATQTYNFEPEQISSGTELADLTAATPGGLHVELHSECVTKRHN

SEQ ID NO: 11611 - protein, 66 aa, Homo sapiens
  DOMAIN (33)..(48): Translation initiation factor SUI1 proteins domain identified by eMATRIX, accession number BL01118A, p-value=4.000e-13, raw score of 12.46
  DOMAIN (8)..(66): Translation initiation factor SUI1 domain identified by PFam, accession name SUI1, E-value=2.5e-09, PFam score of 44.4
TSLTFFSDPFADASKGDDLLPAGTEDYIHIRIQQRNGRKTLTTVQGIADDYDKKKLVKAFKKVGLQ

SEQ ID NO: 11612 - protein, 27 aa, Homo sapiens
DQEIKDCVCVCVCVCVFKCLNLVYLSL

SEQ ID NO: 11613 - protein, 327 aa, Homo sapiens
  DOMAIN (269)..(287): SERUM ALBUMIN FAMILY SIGNATURE domain identified by eMATRIX, accession number PR00802C, p-value=5.500e-20, raw score of 12.28
  DOMAIN (1)..(296): Serum albumin family domain identified by PFam, accession name transport_prot, E-value=1e-06, PFam score of 16.4
  misc_feature (1)...(327): Xaa = X or * as defined in Table 2
HTLFGDKLCTVATLRETYGEMADCCAKQEPERNECFLQHKDDNPNLPRLVRPEVDVMCTAFHDNGETFLKKXVIRCLXFKIKKHGVTPXANTLXKLPXQKYFQHXDLEVLLXXFFKEVVFDTTKFYTAKNMIKDILKFIETGYNLSQKFKIDKFFNVFRRYVYMVVIIDFVLVSNIILPKFNHLCTHTHTHTHLTLFSTYLKNDRDKTIMCKLSLIGXLESLEFGGSGENVDYNYFCNIVCYRKADCFSFLKFRYLYEIARRHPYFYAPELLFFAKRYKAAFTECCQAADKAACLLPKVLCTRIEKKSLLSNLILSILWLDLGTLSV

SEQ ID NO: 11614 - protein, 42 aa, Homo sapiens
  misc_feature (1)...(42): Xaa = X or * as defined in Table 2
MFLSCRSVXXXXXXXXXXXXXXXSPLFLSPLLFLLFHTYMRA

SEQ ID NO: 11615 - protein, 188 aa, Homo sapiens
  DOMAIN (9)..(31): TRANSFORMING PROTEIN P21 RAS SIGNATURE domain identified by eMATRIX, accession number PR00449A, p-value=1.450e-18, raw score of 13.20
  DOMAIN (10)..(185): Ras family domain identified by PFam, accession name ras, E- value=1.4e-84, PFam score of 294.4
VKVRLMREYKVVVLGSGGVGKSALTVQFVTGTFIEKYDPTIEDFYRKEIEVDSSPSVLEILDTAGTEQFASMRDLYIKNGQGFILVYSLVNQQSFQDIKPMRDQIVRVKRYEKVPLILVGNKVDLEPEREVMSSEGRALAQEWGCPFMETSAKSKSMVDELFAEIVRQMNYSSLPEKQDQCCTTCVVQ

SEQ ID NO: 11616 - protein, 132 aa, Homo sapiens
NTPQQGRRSYTTTWMNPKNLTLKTLHNLVLTFISSIVTSFPLITPWSILILEDCQLSLIRSIKVLTYFPFFYVKSDLLSFLNILYFLIPKPFPISFLLPRMPLLLSYAYPKPHLSRTSSKPTLTHQNALGLS

SEQ ID NO: 11617 - protein, 158 aa, Homo sapiens
WATTPFQPKSNSKMAELFMECEEEELEPWQKKVKEVEDDDDDEPIFVGEISSSKPAISNILNRVNPSSYSRGLKNGALSRGITAAFKPTSQHYTNPTSNPVPASPIKFHPESRSSDSSVIVQPFSKPVSVSKTIRPAQGSIGCCLSISTVPSYNSGLS

SEQ ID NO: 11618 - protein, 92 aa, Homo sapiens
TSEAQSTKVFGSGCWGWSNQLNSNFPLILIFSLIPLSAVARPLCAEPCVSIGSCPFHFSVQSGTISHLLCIFPKKCWTSLGYILFFLILCNS

SEQ ID NO: 11619 - protein, 322 aa, Homo sapiens
  DOMAIN (193)..(240): AAA-protein family proteins domain identified by eMATRIX, accession number BL00674D, p-value=9.156e-27, raw score of 23.41
  DOMAIN (115)..(290): ATPases associated with various cellular act domain identified by PFam, accession name AAA, E-value=4.6e-57, PFam score of 203.0
MSVGNLEEIIDDNHAIVSTSVGSEHYDSIISFVEKDLLEPGCSILLRHKVHAVIGVLMDDTGPLVTMMKVEKAPQETYVNTGGLDNQIQEIKESMELPLPHPEYYEEMGTKPPKGVILCGPPGTATFLRVVGSELIQKYLGDGPKLVRQVFQVAEEHAPSIMFTDEIEAIGTKRYDSNSGGEREIQQTMLELELLNQLGGFDSREDVKVIMATKQVETLDPVLIRPGRIDKKIEFHLPDEKTKKHIFQIHTSRMTLANDVTLDDLIMAKDDFSGADIKAICTEAGLMALREHRMKATNEDFKKSIESVLYKKHEGIPEGLYL

SEQ ID NO: 11620 - protein, 320 aa, Homo sapiens
  DOMAIN (279)..(299): AAA-protein family proteins domain identified by eMATRIX, accession number BL00674E, p-value=9.143e-17, raw score of 15.24
MWESLELPRDLEGSEDFLNGFNQNADVDNEVQAKVVSDGDEELVRNWSKGKSGETLYLRLRKAGNKFLPGGILHNIVIKHGLSLAEEADGNKSNRGEELSESEEKLFYTSIHEANQLNKTVKSAQISESDFNFPSVSSESHPTDSGSILCECTVQRPAVQGPGASRATLLLQPLVENPPLLPPSSGCCHSLWLHRPNLCFHFHMAFSSVYPSNQVLAMTTGLSCSDSSKEVLEETSKSGERAVPHSADFLKKRIFQIHTSRMTLADDVTLDDLIMAKDDLSGADIKAICTEAGLMALRERRMKVTNEDYIDFSKIEIREG

SEQ ID NO: 11621 - protein, 63 aa, Homo sapiens
LPNLFVPAGRIDRKIEFPLPDEKTKKRIFQIHTSRMTLADDVTLDDLIMAKDDLSGADIKVRA

SEQ ID NO: 11622 - protein, 508 aa, Homo sapiens
  DOMAIN (204)..(225): AAA-protein family proteins domain identified by eMATRIX, accession number BL00674A, p-value=2.636e-17, raw score of 16.91
  DOMAIN (243)..(450): ATPases associated with various cellular act domain identified by PFam, accession name AAA, E-value=2.4e-08, PFam score of 39.5
  misc_feature (1)...(508): Xaa = X or * as defined in Table 2
NSGGSGGGTSGSGSSSGQGKMGQSQSGGHGPGGGKKDDEDKKKKYEPPVPTRVGKKKKKTKGPDAASKLPLVTPHTQCRLKLLKLERIKDYLLMEEEFIRNQEQMKPLEEKQEEERSKVDDLRGTPMSVGTLEEIIDDNHAIVSTSVGSEHYVSILSFVDKDLLEPGCSVLLNHKVHAVIGVLMDDTDPLVTVMKVEKAPQETYADIGGLDNQIQEIKESVELPLTHPEYYEEMGIKPPKGVILLVPPGTGKTFLPKAVANQTSATFLRVVGSELIQKYLGDGPKTLSRELFRVSEELAPSLRFIDRILPPLGHKRYDSNSGVRRELQRTMLELELLNPVGMGFDSXGRLXKLSWATNRIETLDPALIRPRPAFDSKIEFPLHDEKTKKRIFQIHTSRMTLADDVPLDDLIHGLKIDLSGAXHSRAICTEAGLMGLXGERRMKVTNEDFKKSKENVLYKKQEGTPEGVVSLMNHGLSSGKWLGDFSIPERDEVGGSCPEESLFPLIFY

SEQ ID NO: 11623 - protein, 65 aa, Homo sapiens
KDATGLFLIFETGSRSVTPAGAQWCNYSSLQPELSRFQGSSYLSLPSGLGTIGVRHPHPAVTGLV

SEQ ID NO: 11624 - protein, 44 aa, Homo sapiens
ERKMGFPFSDHGPLESIPWPLPSIQYKPEIRTYVLTCVCECVCV

SEQ ID NO: 11625 - protein, 64 aa, Homo sapiens
NSLRFFFFFLQFSIFIFLSSSTMVSVSVFYMWPKKILPMRSREAKILDTPCLGEHCFVYLVSSS

SEQ ID NO: 11626 - protein, 88 aa, Homo sapiens
KGSTEAFISGTAGWGTGLLPSSAGLPGGWGPAGGWAGTDRRGPRARPIPQKSPPWPWSGDAAKGQSGFLPVAAWAGQGRLPGGGIIVH

SEQ ID NO: 11627 - protein, 185 aa, Homo sapiens
PEPTTVFEWHGVGPAWPWESVPRWGRAGLPERDWVGGCPRITRDGGGGVSGSWLRSLRGPLWRCPLATELPPQLRKPRARSQSGRQMEPDNRRGRQRDRSGWQGGPWTAKAKPGVEKLFPRPKTQALCPNPTQTVPKTRLCLDPDRVRRQPTAYSQVRPSSQRSARAVGRPRRGRSEGLTKPSNR

SEQ ID NO: 11628 - protein, 114 aa, Homo sapiens
  misc_feature (1)...(114): Xaa = X or * as defined in Table 2
NLCQVFIPFLFHSLLYVFKTILKGLFQASFLGHLLLLPLSGTPGRPGGGGAGGSGRGDPPAAGASRTIPWPLLLQQLSSSSSHFKAPSKLSSHGXPRALGPPGPYHRPPSPGTT

SEQ ID NO: 11629 - protein, 123 aa, Homo sapiens
ICRFNPYVFLAAKADQLQVRTTQLTCKSCWLYHCINHSTLQTCNISTLMILGHIPGLWILINLSEPWDATPVWHFVKLLLTKLTHHACRASGIIIFAIVSLVTLITSAVMSSVALHSSVQMAQ

SEQ ID NO: 11630 - protein, 274 aa, Homo sapiens
FFFFKKGSTEAFISGTAGWGTGLLPSSAGLPGGWGPAGGWAGTDRRGPRAQAHPTEKPSLAMVGRCSQRTVRLPPGGGVGLGKEGFPEEASLSTEKHRGAWPLPVCLLGAGHGWALQTLLQPWEDSRVRGVAGWGAWWGREGAGGTTGGTCRGPLGHWYWLGEDSVLQRLCDMSSYTTHAAEFLSRHEHSFFICVLASTHATPRPSPRRKEITARAAGRAEAAGGSGRAEAVCGSGRAEPVGGAGRAEALGGASEHLCHPWDCSSVTRTRVPEP

SEQ ID NO: 11631 - protein, 170 aa, Homo sapiens
  DOMAIN (136)..(163): C1q domain proteins domain identified by eMATRIX, accession number BL01113A, p-value=7.750e-09, raw score of 17.99
MEVYHPLWAAFPSNPTSGKTRAPARRGPLPASHRPRAGPRSEGLGPPTSGAGERVFPYATCPAHRRGAGIRALGSSLFTRRLLRESWLVSFPPLTNMLKFSGSPRLLVPNSARTVMPLDVRGCTRATLTGSACAYPTPAGAGNPLNPIRDGDRGLQLFPHERGIPSKCGS

SEQ ID NO: 11632 - protein, 62 aa, Homo sapiens
ANSDSMVGYVLGPFFLITLVGVVVAVGGPAAHHLLPMYSYDPAEELHEAEQELLSDMGDPKV

SEQ ID NO: 11633 - protein, 67 aa, Homo sapiens
HQQPEGWVVSMGSWRFGRAPPLGSLPPLQPRQERPRLAPGPRKSRQARDQRTRGNGPGLSTRTQPIR

SEQ ID NO: 11634 - protein, 34 aa, Homo sapiens
WYEFRKMKMSSLGKEYSRKMEHVQRLSVQTVWKA

SEQ ID NO: 11635 - protein, 149 aa, Homo sapiens
RLQLLNSNYVKPPSLSGGFPRGIQDPPAGCQAAGISAGEEGSPIPTAMRCPGDWRSSGRLGSQSPAYSSSRECRALEQDQAASADTESLQGEVRSLFLSYFSLRLPSQQAAIEHSAIARQSPSGLQNALRQAHRENQSRLLAPVGKMAL

SEQ ID NO: 11636 - protein, 51 aa, Homo sapiens
  misc_feature (1)...(51): Xaa = X or * as defined in Table 2
MICKNKNKVILLXXXXXXXXXXXXXGGAXXXXXTTPPRRRGKKQFFLPPKQ

SEQ ID NO: 11637 - protein, 43 aa, Homo sapiens
KKLPEMEGPDETLKHTNTHTHTHTHTHTHTHTRLHESKLLHEV

SEQ ID NO: 11638 - protein, 82 aa, Homo sapiens
GRGTSKILMALQRTHSLLLLLLLTLLGLGLAYPSYGHDVLYHRVVADNGHLEETLVMDRCLSVMILLRIISRDDCERLIGLA

SEQ ID NO: 11639 - protein, 461 aa, Homo sapiens
  DOMAIN (235)..(279): Ependymins proteins domain identified by eMATRIX, accession number BL00898B, p-value=6.486e-11, raw score of 19.75
  DOMAIN (168)..(359): Ependymin domain identified by PFam, accession name Ependymin, E-value=0.0045, PFam score of -22.8
MPGRAPLRTVPGALGAWLLGGLWAWTLCGLCSLGAVGAPRPCQAPQQWEGRQVMYQQSSGRNSRALLSYDGLNQRVRVLDERKALIPCKREIFREEGLLGIAWSGTGRGAAPTEGGLLAGDSVTPSEAVAECIPKMWTQNGAMWSKSGSENTILEIVVVVQVTDQASVALDATQGHAGPFPAQLCWQLLPGSLHGALESSILTEMIELSSIKSCKPKMKESLLEQRKLIVTLLFEYILLYKDGVMFQIDQATKQCSKMTLTQPWDPLDIPQNSTFEDQYSIGGPQEQITVQEWSDRKSARSYETWIGIYTVKDCYPVQETFTINYSVILSTRFFDIQLGIKDPSVFTPPSTCQMAQLEKMSEDCSWTLIHYLGCELLGYGYLQKEVKKKEQEGEEEDTKKKRKKKKKKKRKRKKNKRRRRRKRKRRKRKRKREKEKEKRKRRGRREEEREGRGMEEEKRRM

SEQ ID NO: 11640 - protein, 224 aa, Homo sapiens
  DOMAIN (93)..(137): Ependymins proteins domain identified by eMATRIX, accession number BL00898B, p-value=6.486e-11, raw score of 19.75
  DOMAIN (25)..(217): Ependymin domain identified by PFam, accession name Ependymin, E-value=1.2e-05, PFam score of 14.0
MPGRAPLRTVPGALGAWLLGGLWAWTLCGLCSLGAVGAPRPCQAPQQWEGRQVMYQQSSGRNSRALLSYDGLNQRVRVLDERKALIPCKRLFEYILLYKDGVMFQIDQATKQCSKMTLTQPWDPLDIPQNSTFEDQYSIGGPQEQITVQEWSDRKSARSYETWIGIYTVKDCYPVQETFTINYSVILSTRFFDIQLGIKDPSVFTPPSTCQMAQLEKMSEDCSW

SEQ ID NO: 11641 - protein, 77 aa, Homo sapiens
KFLWLLTTQVCTHVAARQRSPTRLPVSCTQTCGQIVASGCLRHFPLCIGFSCISNYSCNRHPPHCAHWFCLCPQELI

SEQ ID NO: 11642 - protein, 58 aa, Homo sapiens
GNRKMGRWPMGNQVRARQTPNPMQQHSCPRSLPGPSSSHSHNLSSGTRPSSPDTPPER

SEQ ID NO: 11643 - protein, 107 aa, Homo sapiens
  DOMAIN (27)..(73): Proteasome B-type subunits proteins domain identified by eMATRIX, accession number BL00854A, p-value=4.405e-24, raw score of 33.93
  DOMAIN (24)..(81): Proteasome A-type and B-type domain identified by PFam, accession name proteasome, E-value=6.3e-17, PFam score of 66.3
  misc_feature (1)...(107): Xaa = X or * as defined in Table 2
NAVLEADFAKRGYKLPKVRKTGTTIAGVVYKDGIVLGADTRATEGMVVADKNCSKIHFISPNIYCCGAGTAADTDMTTQLISSLAAMAVFEDKFRPDMEEEEAKNLX

SEQ ID NO: 11644 - protein, 145 aa, Homo sapiens
  DOMAIN (27)..(67): Proteasome A-type and B-type domain identified by PFam, accession name proteasome, E-value=0.00051, PFam score of 19.5
DPRATEGMVVADKTCQKSTGRLPELVTAIRMLKQMLFRYQGYIGAALVLGGVDVTGPHLYSIYPHGSTDIAAGIFNDLGSGSNIDLCVISKNKLDFLRPYTVPNKKGTRLGRYRCEKGTTAVLTEKITPLEIEVLEETVQTMDTS

SEQ ID NO: 11645 - protein, 353 aa, Homo sapiens
MRKKFLGSTILDLHYSGCRALGYSCGDHYVADVDLFVPFTSAAHLSCSGKWNCTLESRDTLCDAEEEAKNLVSEAIAAGIFNDLGSGSNIDLCVISKNKLDFLRPYTVPNKKGTSPEEVSTTFCRLASISHCTHNSTSGVIHKEGMERSEPAGIHCGLHSTLRKLSGLLMGWGSTGPENAGTGVGECWWLAWWLPANQSVLEMELNQMTSNEPTKSLGPLAGRQATFQAQSCVGEPGFAELQPSSTRSCSPLARKAEALNACRKNRALSPQCPCVQGRGWVFREHKAMAQPAAFWQFLKDSKFDRDITPAGARAEEQLGRYRCEKGTTAVLTEKITPLEIEVLEETVQTMDTS

SEQ ID NO: 11646 - protein, 64 aa, Homo sapiens
FGRGHYCRRSVSQEEEAKNLVSEAIAAGIFNDLGSGSNIDLCVISKNKLDFLRPYTVPNKKGTR

SEQ ID NO: 11647 - protein, 283 aa, Homo sapiens
  DOMAIN (52)..(98): Proteasome B-type subunits proteins domain identified by eMATRIX, accession number BL00854A, p-value=4.405e-24, raw score of 33.93
  DOMAIN (50)..(166): Proteasome A-type and B-type domain identified by PFam, accession name proteasome, E-value=4.7e-17, PFam score of 66.8
  misc_feature (1)...(283): Xaa = X or * as defined in Table 2
FLGKMAAVSVYAPPVGGFSFDNCRRNAVLEADFAKRGYKLPRPRKTGTTIAGVVYKDGIVLGADTRATEGMVVADKNCSKIHFISPNIYCCGAGTAADTAMTTQLISSNLKLHSLSTGRLPRVVTANRMLKQMLFRYQGYIGAALVLGGVDVTGPHLYSIYPHGSTEKVPYVTHGFLAPLAAMALFERXVXAPDMEEEEAKNLVSEDSPPQFPPPSWRIFNDLGSRKPNIDPLPSSARNKLGFSPPHTQLPNKKGTRLGWPRYRCEKGTTAVLTEKIPLLWST

SEQ ID NO: 11648 - protein, 59 aa, Homo sapiens
SCVHHWEWREINDWMVAANISFKIEHSKTKGCLKPVPCPSDLHKHSSPGKVEPPSLSPE

SEQ ID NO: 11649 - protein, 603 aa, Homo sapiens
  DOMAIN (41)..(49): RNase H domain identified by eMATRIX, accession number PF00075E, p-value=9.438e-09, raw score of 8.53
  DOMAIN (36)..(157): RNase H domain identified by PFam, accession name rnaseH, E- value=7.4e-11, PFam score of 49.5
  misc_feature (1)...(603): Xaa = X or * as defined in Table 2
MPSPSPLFFVATIHDCQELLETTETGPSDLQDVPLEKADATVFTDGSSFLEQGVRKAGAAVTTETDVLWAHALPANTSAQKAELIALTQALRWGKDINVDTDSRYAFATVHVHGAICQERRLLTSAEKAIKNKNPPSSKPNRSSSSLGNNLRPDGSMYMHRSKGVPAVSVNVNILTPSESLNLESSCVTKKLSPEKEIYEMESLQWENMGKRINHHLQYNGLGDNMECKGNLEGQEASQEGLYMCVKITCEEKATESHSTSSTFHRIIPTKEKLYKSPNPSQDTGYSQHHTRTTFSKRQPKNCERFPVEGRPLTLPAQTSXGYSGSKPDVITLLEQGKEPCVVARDVTRRQCPAAPMVDSLIARVGVMARGNAITLPVCGRDVKFTLEVLRGDSVEKTSRVWSGNERDQELLTEDALDDLIPSFLLTGQQTPAFGRRVSGVIEIADGSRRRKAAALTESDYRVLVGELDDEQMAALSRLGNDYRPTSAYERGQRYASRLQNEFAGNISALADADNISRKNITRCINTAKLPKSVVALFSHPGDYLPVPQAKGNNVVITSYMTNRGFFEDKKATFAPSFLMNIKGNKTSVVKNSILEQGQLTVN

SEQ ID NO: 11650 - protein, 260 aa, Homo sapiens
  DOMAIN (10)..(49): PROTEIN ZINC FINGER ZINC-FINGER METAL-BINDING NU domain identified by eMATRIX, accession number PD01066, p-value=1.706e-27, raw score of 19.43
  DOMAIN (8)..(75): KRAB box domain identified by PFam, accession name KRAB, E- value=2e-22, PFam score of 88.0
NHWPMHLVTFRDVAIDFSQKEWECLDTTQRKLSRDVMLENYNNLGLTGSDILGSKPVVITLLEQGKEPCVVARDVTGRQCPGLLSRHKTKKLSSEKDIHEISLSKESIIEKSKTLRLKGSIFRNEWQNKSEFEGQQGLKERSISQKKISLKKMSADRKRPSFTLNQRIHNSEKSCDSHLVQHGKIDSDVKHDCKECGSTFNNVYQLTLHQKIHTGEKSCKCEKCGKVFSHSYQLTLHQRFHTGEKPYECQECGKTFTLYP

SEQ ID NO: 11651 - protein, 58 aa, Homo sapiens
GESVPLEDRVLRCFHSKQDSDNSTALLPSLAPFLSHLLGLFASCKLCGWTLRDPEFRI

SEQ ID NO: 11652 - protein, 64 aa, Homo sapiens
EKKTENTCQVFLFSAVLCAPAPGAVQGMGSLLSWGNNRCLVPGCTPPTSSAGSVPITPTRSCCP

SEQ ID NO: 11653 - protein, 696 aa, Homo sapiens
PTQSTRRIATVSIAAAVAPLTLFLYRGDGGLSSRRRADAAAGALCGEVAVKPPINPFTEFMEKAVNDGSHSEELFCHLKTISEKEDLPRCTSESHLSCLKQDILNEKTELEATLKEAELVTHSVELLLPLFKDTIEKINFENANLSALNLKISEQKEILIKELDTFKSVKLALEHLLRKRDYKQTGDNLSSMLLENLTDNESENTNLKKKVFEKEAHIQELSCLFQSEKANTLKANRFSQSVKVVHERLQIQIHKREAENDKLKEYVKSLETKIAKWNLQSRMNKNEAIVMKEASRQKTVALKKASKVYKQRLDHFTGAIEKLTSQIRDQEAKLSETISASNAWKSHYEKIVIEKTELEVQIETMKKQIINLLEDLKKMEDHGKNSCEEILRKVHSIEHENETLNLENTKLKLRFPCRITESKNMNILIVLDMLCYISSEKTTLAALKDEVVSVENELSELQEVEKKQKTLIEMYKTQVQKLQEAAEIVKSRCENLLHKNNQITKTKNKNVEKMRGQMESHLKELERVCDSLTAAERRLHECQESLQCCKGKCADQEHTIRELQGQVDGNHNLLTKLSLEEENCLIQLKCENLQQKLEQMDAENKELEKKLANQEECLKHSNLKFKEKSAEYTALARQLEAALEEGRQKVAEEIEKMSSRESALQIKILDLETELRKKNEEQNQLVCKMNSDPETP

SEQ ID NO: 11654 - protein, 166 aa, Homo sapiens
TFARWMPERSWLNSQMEGEKPHLHCPSPTGQTPLPPSTPPSSRKSCPHTGFHRAPLSSGHLEAGWELTHVCRLKKDSAGSAQPCRGFCLCPDVCFPVAFSLGEENRETLVKCFCFLPCCVPPPPGAVQGMGSLLSWGNNRCLVPGCTPPTSSAGSVPITPTRSCCP

SEQ ID NO: 11655 - protein, 158 aa, Homo sapiens
  misc_feature (1)...(158): Xaa = X or * as defined in Table 2
AATTPALRPLRRSSFLMATTITKASTGTWSSSPSLPTPPPTSTLRKAPTTLIQKWRPGAQQPSCPKPRSXPSSSTPRTGPIPGTSTSEPMTTQWPXSTPSMRXLPPALTHPRSCVPSRTAAWVLGWYATHIERWLSAYSRQPDSGLGWQTCFAQNLPK

SEQ ID NO: 11656 - protein, 40 aa, Homo sapiens
PSYIAYMCICMCVCVYVYINICVCIYTHVHTPYNPVISKN

SEQ ID NO: 11657 - protein, 69 aa, Homo sapiens
FFYFPQVVFFIPPQGLELVLVKKNKKKSTLDREESRQENHLNSGGGGCGEPRLCHCPPSWATRTKLCLK

SEQ ID NO: 11658 - protein, 63 aa, Homo sapiens
GSISLTESWATVSCGPHPQTLEDSHHKPWKGGCHCCRAQGCDSGVPHCRGAGAGSASTCKMGI

SEQ ID NO: 11659 - protein, 84 aa, Homo sapiens
  misc_feature (1)...(84): Xaa = X or * as defined in Table 2
GRGIQLFHEIQLQLSKTLCEPAVPVQRLRGRTAARWPGSRESPLRPVFDVEYCGVLIFIILFIXWRHFHSLCWSGDDIILACLL

SEQ ID NO: 11660 - protein, 64 aa, Homo sapiens
SWSAPSRPGHVCGSFSFFLFFFFFKKKKGSAEISVASSQRISSIREKLCVCVCVCAHVCACARV

SEQ ID NO: 11661 - protein, 102 aa, Homo sapiens
GGQPPHPPAARPGGRWGCQPPARQPLRPGGSVSTGTGFPPGRWQPETSWVSCRHCGPHLSAVWGLPRLSPLPAGPNPRQPQLSEFPRPKEFLTPRTQKTKPN

SEQ ID NO: 11662 - protein, 63 aa, Homo sapiens
  misc_feature (1)...(63): Xaa = X or * as defined in Table 2
WPPGPLQPRGTEHRPPTPDTTPRAARSTRSHSPSEPRTRTWPQQRXLPRPSKPSHGPDVIEAA

SEQ ID NO: 11663 - protein, 479 aa, Homo sapiens
  DOMAIN (184)..(195): Trp-Asp (WD) repeat proteins proteins domain identified by eMATRIX, accession number BL00678, p-value=2.385e-11, raw score of 9.67
  DOMAIN (116)..(325): WD domain, G-beta repeat domain identified by PFam, accession name WD40, E-value=1.3e-35, PFam score of 131.8
MATEIGSPPRFFHMPRFQHQAPRQLFYKRPDFAQQQAMQQLTFDGKRMRKAVNRKTIDYNPSVIKYLENRIWQRDQRDMRAIQPDAGYYNDWTPEGRRLVTGASSGEFTLWNGLTFNFETILQAHDSPVRAMTWSHNDMWMLTADHGGYVKYWQSNMNNVKMFQAHKEAIREASFSPTDNKFATCSDDGTVRIWDFLRCHEERILRGHGADVKCVDWHPTKGLVVSGSKDSQQPIKFWDPKTGQSLATLHAHKNTVMEVKLNLNGNWLLTASRDHLCKLFDIRNLKEELQVFRGHKKEATAVAWHPVHEGLFASGGSDGSLLFWHVGKFWTRNRPGDKMRDRYNLNLLPGMSEDGVEYDDLEPNSLAVIPGMGIPEQLKLAMEQEQMGKDESNEIEMTIPGLDWGMEEVMQKDQKKVPQKKVPYAKPIPAQFQQAWMQNKVPIPAPNEVLNDRKEDIKLEEKKKTQAEIVYRNGYITIY

SEQ ID NO: 11664 - protein, 123 aa, Homo sapiens
PTQSTRRIATVSIAAAVAPLTLFLYRGDGGLSSRRRADAAGGAPFSLCGEVAVKPPINPFTELMENAVNDGSHSEELFCHLKTISQKEDLTRCTSESHLSWYSHQYQGKSKFPILGFPVLSII

SEQ ID NO: 11665 - protein, 94 aa, Homo sapiens
VFFCFDFFKYIYICGVYIHICIYIYIYTYTYIYTHTHTYIYIYIYIYIYIYIYTHTHTHTHTHIYIYIYIYIYIYIYIAASWAANAISWRQVSC

SEQ ID NO: 11666 - protein, 27 aa, Homo sapiens
  misc_feature (1)...(27): Xaa = X or * as defined in Table 2
GEEPTSVFXRNQWNLRPHKHFGNASPW

SEQ ID NO: 11667 - protein, 107 aa, Homo sapiens
PQSYKSHLRFTKPSECLFPLSSPAAPNYIFKQTSRILALMLVLDIGHSCYQNRDTGWRVSTSPQHRIKLISGAEMIAKDLSHVNPKATPSPLWNQMGNRPTNCFILI

SEQ ID NO: 11668 - protein, 44 aa, Homo sapiens
LDHGGFTIVAKWWEVAYLKMYVCVCCIFSHFVNKAHLLKILNFL

SEQ ID NO: 11669 - protein, 46 aa, Homo sapiens
EKPQISLQIDFVCRSQFRMHTHTHTHRDVFIFPNWILVSEIESWYK

SEQ ID NO: 11670 - protein, 39 aa, Homo sapiens
ILFADLSSECTHTHTHTHTHTHTHTEMYLSFQIGFWFQR

SEQ ID NO: 11671 - protein, 39 aa, Homo sapiens
CQQGFSFLQAYGPAQHAISMRKFKAKYPDYEVTWANDGY

SEQ ID NO: 11672 - protein, 271 aa, Homo sapiens
TGEAEHLGLARADTWLGEEGPRDGAFPGGSLEGKAWCEQPRGPPNCPVPRVPPDPAGEELLRWLISSPPIADSTFPLSGAGGAARRQGTGLRLVSTCLGPRYNWLRRWALGSIPRRDWSSLSQSPPPAVQAAPGWGWEGGDSGRRNMAVADLVLIPDVDIDSDCVFKYVLIRVHSAPRSGAPAAESKEIVRGYKWAEYHADIYDKVSGDMQKQGCDCECLGGGRISHQSQDKKIHVYGYSMVSRSPVPPCRRPQYQLRGPPEPAALTRGPS

SEQ ID NO: 11673 - protein, 119 aa, Homo sapiens
GIPGRRNMAVADLDLIPDVDIDSDGVFKYVLIPSPLGIPAPGIRPAESKEIVRGYKWAGHHADIYDKSVGATCRKQGLRTVSILGGGRISHTKSPGQERFTVYGYSMGLWSCPRTPIST

SEQ ID NO: 11674 - protein, 84 aa, Homo sapiens
NSVLTLALLFSLHVHLPPPPSGVTDTAGALPTGGPPSPTSVTGRGPAHSHASQLPPAPGEFAPLNESCRGWAGEAFLEKVSLLI

SEQ ID NO: 11675 - protein, 338 aa, Homo sapiens
  DOMAIN (214)..(228): Src homology 3 (SH3) domain proteins profile domain identified by eMATRIX, accession number BL50002B, p-value=4.000e- 14, raw score of 15.18
  DOMAIN (82)..(150): Eukaryotic protein kinase domain identified by PFam, accession name pkinase, E-value=0.0028, PFam score of 15.7
MLLKLQCAHRSPGETFKINSDSVGLGEASADSSYKLLVDANVAERAAGLCCRLVVPCHKGMPRLTDLSVKTKDVWEIPRESLQLIKRLGNGQFGEVWMEKADGLCFNLTVIASSCTPQTSGLAKDAWEVARRSLCLEKKLGQGCFAEVWLEIPVYPLKKGSKRFAKPSFPVGEVPYCACRELAVGHGPSTPHPNDSSQPSRKEGDWWEARSLTTGETGYIPSNYVAPVDSIQAEERAENEAQVSAQGRKDPGDGRNKALQLVGGSVARVLTATHGSGAGGMDTTCRRDIEYEEGRKRKRTKKKRELESQMPRGLCCGLSGGPAVQYGHNLTRETMVEK

SEQ ID NO: 11676 - protein, 120 aa, Homo sapiens
  DOMAIN (26)..(41): MYOGLOBIN SIGNATURE domain identified by eMATRIX, accession number PR00613A, p-value=4.600e-20, raw score of 8.32
  DOMAIN (21)..(59): Globin domain identified by PFam, accession name globin, E- value=3.5e-09, PFam score of 36.5
GGGQRAIERSLSSIPEDCAMGLSDGEWQLVLNVWGKVEADIPGHGQEVLIRLFKGHPETLEILSMLFLTVVIGSLCPLFMTDRVIVLLFISFLYHHYCYDSYHLFLTYNILYRSCLSMLP

SEQ ID NO: 11677 - protein, 49 aa, Homo sapiens
ELLIWTSLWWELCAYTCLCVCKCAGSFVCMCTCGNLCLSYFSSFHKGFF

SEQ ID NO: 11678 - protein, 249 aa, Homo sapiens
PGDPRVRGRVAWRSNNSRKSSADTEFSDECTTAERVLMKSPSPALHPPQKYKDRGILHPKRGTEDRSYQPSLKSTDSRSYPSRGARPSPRGSGKGSKSPSPRPNMPDRYFIMKSSNLRNLEISQQKGIWTTTTSNERKLNRAFWESSIVYLVSSVQGSGHLQGFSRMSSEIGREKSQDWGSAGLGGVFKVEWIRKESLPFQFAHHLLNPWNDNKKVQISRDGQELEPLVGEQLLQLWERLPLGEKNTTD

SEQ ID NO: 11679 - protein, 50 aa, Homo sapiens
  misc_feature (1)...(50): Xaa = X or * as defined in Table 2
INAHLKFKVYFLSQAPLKCTWKTSAARENHVXLTFLMFYGTLGTGVCFCL

SEQ ID NO: 11680 - protein, 41 aa, Homo sapiens
LHVYIKTLTHTHTHTHTHTQFCMSVNNIAKLLCNFYLGIKQ

SEQ ID NO: 11681 - protein, 69 aa, Homo sapiens
CSRYSVPRGMFPRHTLLSTALGSSRTTSQIITQIFKIVETCPNIGLCHREKGLLLRLTGTCKSHLRSPQ

SEQ ID NO: 11682 - protein, 58 aa, Homo sapiens
YTQMEEQNHFHLQENSKQSDPFSSKICGLASELLENKLISSSTLEEFCWLGAGSIARK

SEQ ID NO: 11683 - protein, 53 aa, Homo sapiens
LPGARPGDCGSAGEGTLDLLSSLAHKAPPIKRGSLCHTHTHTHTHTHTHTHTQ

SEQ ID NO: 11684 - protein, 70 aa, Homo sapiens
LPGARPGDCGSAGEGTLDLLSSLAHKAPPIKRGSLCHTHTHTHTHTHTHTHTMIGGLYDPALASWCAKHA

SEQ ID NO: 11685 - protein, 118 aa, Homo sapiens
LLKYPINHFWGVSSIYRMILQQDFTSIRFPALEHCYTGGEVVLPKDQEEWKRRTGLLLYENYGQSETGLICATYWGMKIKPGFMGKATPPYDVQVIDDKGSILPPNTEGNIGIRIKPV

SEQ ID NO: 11686 - protein, 538 aa, Homo sapiens
  DOMAIN (90)..(109): Src homology 3 (SH3) domain proteins profile domain identified by eMATRIX, accession number BL50002A, p-value=3.571e- 17, raw score of 14.19
  DOMAIN (272)..(520): Eukaryotic protein kinase domain identified by PFam, accession name pkinase, E-value=6.6e-75, PFam score of 262.3
IMGCVQCKDKEATKLTEERDGSLNQSSGYRYGTDPTPQHYPSFGVTSIPNYNNFHAAGGQGLTVFGGVNSSSHTGTLRTRGGTGVTLFVALYDYEARTEDDLSFHKGEKFQILNSSEGDWWEARSLTTGETGYIPSNYVAPVDSIQAEEWYFGKLGRKDAERQLLSFGNPRGTFLIRESETTKGAYSLSIRDWDDMKGDHVKHYKIRKLDNGGYYITTRAQFETLQQLVQHYSERAAGLCCRLVVPCHKGMPRLTDLSVKTKDVWEIPRESLQLIKRLGNGQFGEVWNGTWNGNTKVAIKTLKPGTMSPESFLEEAQIMKKLKHDKLVQLYAVVSEEPIYIVTEYMNKGSLLDFLKDGEGRALKLPNLVDMAAQVAAGMAYIERMNYIHRDLRSANILVGNGLICKIADFGLARLIEDNEYTARQGAKFPIKWTAPERALYGRFTIKSDVWSFGILLTELVTKGRVPYPGMNNREVLEQVERGYRMPCPQDCPISLHELMIHCWKKDPEERPTFEYLQSFLEDYFTATEPQYQPGENL

SEQ ID NO: 11687 - protein, 72 aa, Homo sapiens
ECGDVCDTGDRASVDEEGYIWFLGRSHHTINASGVVKALIVLTPQFLSHDKDQLIKELQQHVKSVTAPCIGC

SEQ ID NO: 11688 - protein, 282 aa, Homo sapiens
MYANVHSSFTLNSQNLKTTIQMAFNRLYVNAELIAGDPEKTAKVECGDFYNTGDRGKMDEEGYICFLGRSDDIINASGYRIGPAEVESALVEHPAVAESAVVGSPDPIRGESKGWRQNGISAMWLPNIHALKTGILLRDSRNYRGSPDASVLVSRSSLSRGNLGSDSIGQLAASIQRQSPVAVAVRIWVDQTQHKAVEATKSGGVKGIRKDKLRVHKVGPGDQHWYGGCEDPKLWEPTLFIGDQTKKQVTLLKYPINHFWGVSSIYRMILQQDFTRYGRSGL

SEQ ID NO: 11689 - protein, 185 aa, Homo sapiens
FTGLLLQVIDDKGSILPPNTEGNIGIRIKPVRPVKLFMCYEGDPEKTAKVECGDFYNTGDRGKMDEEGYICFLGRSDDIINASGYRIGPAEVESALVEHPAVAESAVVGSPDPIRGEVVKAFIVLTPQFLSHDKDQLTKELQQHVKSVTAPYKYPRKVEFVSELPKTITGKIERKELRKKETGQM

SEQ ID NO: 11690 - protein, 96 aa, Homo sapiens
RQVLLFWGRGKYHNPFSPCLYPFSAFLGEGQVPLNPFSFTLSGKSRFSRGQEPLNPLFPHPDLLSVCPNPLFPHPDPFPAFLEGKNPRTPRTRGST

SEQ ID NO: 11691 - protein, 68 aa, Homo sapiens
  misc_feature (1)...(68): Xaa = X or * as defined in Table 2
NKIVLKCWGGENFWGVVWRENGRCFSGLLQAGLGAAWEPRVGIVRRNICCIEXLVMAWIRFCMNXKTK

SEQ ID NO: 11692 - protein, 117 aa, Homo sapiens
  misc_feature (1)...(117): Xaa = X or * as defined in Table 2
QLKTDTAQSPRSPLDHHGHRASGNSHSGSIHPDGLKXLKNHKRSEKPCPTLTDDIPPQKKCKWPVLALSADITLXKSFSWLILAQKAPPLSTLXPPLLPAREQMSFDCNFPLPTQIL

SEQ ID NO: 11693 - protein, 62 aa, Homo sapiens
  misc_feature (1)...(62): Xaa = X or * as defined in Table 2
IRTPLKIGLFNSPGSHSQSPWNSGPRLSDWTPSQIFSAXQLKTDAAGSPRKPPRPSRTPSFR

SEQ ID NO: 11694 - protein, 238 aa, Homo sapiens
  DOMAIN (182)..(199): Zinc finger, CCHC class domain identified by PFam, accession name zf-CCHC, E-value=0.0026, PFam score of 24.4
  misc_feature (1)...(238): Xaa = X or * as defined in Table 2
DTISYQLEWRSLKSQETTDQAPMSSLXNFLRSNPWLSXRLGAXWNADEQGVPLIQEMLESWASICKVPKYPNAEAVRPEEQTPHLHPGEINSHVAHTKLVWWSLHTDTHEIWCRDSDRGTSLGRSIPCPPALCSVRKIHLRPQVLRPTSPRNISPISNPHTRTSQTPEPQRPGVPPEPPSPGACYKCQKSDHQAKECLQPRIPPKPCPICAGPHWKLDCSAHLAATLRAPGTLAQGSL

SEQ ID NO: 11695 - protein, 133 aa, Homo sapiens
PSAAGLLEFAGGPLQTLFAWVSAAEAAEQRVLLNSQWLLPDRSSGSFVSGSIWPCEVSVCPSSRCWRPRRKPLEAHLVQPQPPTLLAPVLVLLAVCYGWSPRPLAHTLFAASRLAHHGVDRQNNLVDKAQILN

SEQ ID NO: 11696 - protein, 189 aa, Homo sapiens
  misc_feature (1)...(189): Xaa = X or * as defined in Table 2
MGKKQNRKTGNSKKQSTSPPPKERSSSPATEKSWMENDFDELREEGFRRSNYSELREDIQTKGKEVENFERNLEECITRITNTEKCLKELMELKTKARELCEECRSLRSLMRSTGRLLIKKTPFSSGXSRIXFNNXASNSLYXNINSNKSLPXPLKGPILSKPSASNIPCISLQWVQAFQKSESLPAPR

SEQ ID NO: 11697 - protein, 135 aa, Homo sapiens
  DOMAIN (96)..(116): Eukaryotic protein kinase domain identified by PFam, accession name pkinase, E-value=0.035, PFam score of 11.8
GALCAASVPRCVWSSAGVVALFEEHCAPLVWVYTYECCHYMCSALLSLSCPCPAPSERAAGLCCRLVVPCHKGMPRLTDLSVKTKDVWEIPRESLQLIKRLGNGQFGEVWMGMLRLNYSLISFPVWKIPNTKDGR

SEQ ID NO: 11698 - protein, 213 aa, Homo sapiens
  misc_feature (1)...(213): Xaa = X or * as defined in Table 2
FIDSMPSPSRYQXLSSQNWKKLLXSSYGTKEEPASPSQSXAKRTKLEASHYLTSNYTTRLQXLFQKHTMLSPRENLTQPACTQVKXTAMLLTQRPVWWSLHTDAHEIWCCDSDRGTSLGRSIPRPPALCSVRKIHLRPQVLRPTSPMNISPILNQLSSLRLTLPDRLRSPLDHHGRRASARLHPGEINSHVAHTKPVWCSLHTDTHENDKNKQ

SEQ ID NO: 11699 - protein, 254 aa, Homo sapiens
MIQEHADKQVQRLQGVLLGSIPTAASRARLHPGEINNHVAHTEPVWWSLHMDAYEIWCRGSDRRTSLGRSIPLPPALCSLRRIHLRPQVLRSTSPRNISPISNPGHLSDYTPTFQGCQTMQGRLPWSFTLSGKSRFSGEGATQRQYPIPQQALKGLMPAITRLSTAWPFKAYKLSLPFPHFTCPKTRQALQVSSGSAPYQPNCFAYPPHGAKPIYSSILNTCLYNPLFCSRSQTSFLYYSFAPFIPASLRIHLD

SEQ ID NO: 11700 - protein, 133 aa, Homo sapiens
  misc_feature (1)...(133): Xaa = X or * as defined in Table 2
MWNAVTLWQQRESCIEEESEIGTLETKETHFIRGPKTLAPVTDWEGSPSLGVXSMQGRLSDYTPTFQGFQTTQGRLPWSFTLSSKSCFSAGRGKLLLARPSXVPILPQPLLLHPTILLSPPLLTPGQAYSFIP

SEQ ID NO: 11701 - protein, 310 aa, Homo sapiens; identical to SEQ ID NO: 10119

SEQ ID NO: 11702 - protein, 194 aa, Homo sapiens
  DOMAIN (85)..(102): Zinc finger, CCHC class domain identified by PFam, accession name zf-CCHC, E-value=0.017, PFam score of 19.5
MATAVHLPASQPGTHQKIIDMAMKALDAGQQPALWALASTDFTSLKKLRPQSVTSRNSRAVTSSSERKGGTPDYSPTFQRCQTTRSLYTCRKSGHQAKECPQPGFLLSRVPSVRDPTENRLFNSPGSHSQSPWNSGQGSLTDSFPDLLGLSAETDTARSPRKPRRPSRTRASVSQFIQNHIQAITIILYDKCFF

SEQ ID NO: 11703 - protein, 206 aa, Homo sapiens
  misc_feature (1)...(206): Xaa = X or * as defined in Table 2
MAKSFSGSGKSVCKSPKGKNNTWETRMIGDGGLQEGSLTMKFEDGKYLFGFNIIEGDFCEDSNFQTGESVSDVYFENVSALQRESTGSGIAQERNDEGLESGRAVLCIEECLSASLASTSQSSIEQPLPTSSPTKTKQNMTPDIAEYPQWAIWTSLKTTTIVLRPSXVLILPQPPLLHPIIFLSPPLLTPAPAYSFIPPSQTPSFG

SEQ ID NO: 11704 - protein, 349 aa, Homo sapiens
  DOMAIN (147)..(167): SYNAPTOBREVIN SIGNATURE domain identified by eMATRIX, accession number PR00219C, p-value=6.250e-12, raw score of 9.04
  DOMAIN (287)..(304): Zinc finger, CCHC class domain identified by PFam, accession name zf-CCHC, E-value=0.017, PFam score of 19.4
MEEHFMLMGSKNQYRENGHTAQEKLLYAFHNISLKQSSSLSLSQNFPNNENNDGSKDDDDGGDDDDDCQASEAKPNSACLHPGEINSHVAHTKPVWWSLHTDTHENDNGDVGDDNVDDDVDDDGGDDGKDDGDDDDGDTVMVVMMIMMMVLMVVMIVVVVVVVVVVASRKAFLFLINGEESELESHLTGFANIPNHHLTVQHIYTPTLPSGETKETRFICGPKTPALVTDWEGSLPLVFNPCRDASLIIQPRFKAASPAILGEGQVPLNPFSFTLSGKSRFSGEGARAYYKCRKSDHQAKECPQPRIPPKLCPICAGPHWKSDCSTHLAAAPRTPGTLAQGSLTDSFLA

SEQ ID NO: 11705 - protein, 100 aa, Homo sapiens
  misc_feature (1)...(100): Xaa = X or * as defined in Table 2
TAAARRSSRTSSHRSLLHVPEIWPLGQGMPAARDSSXAASHLCRTPPKIGLFNLPGSHSQSPWKSGPRLSDXLLPRSSRLSSXRALGQISRGSGSGCQVS

SEQ ID NO: 11706 - protein, 90 aa, Homo sapiens; identical to SEQ ID NO: 10099
  DOMAIN (26)..(43): Zinc finger, CCHC class domain identified by PFam, accession name zf-CCHC, E-value=0.00037, PFam score of 27.3

SEQ ID NO: 11707 - protein, 148 aa, Homo sapiens
MNLNRNALVLTLFSDSARLHPGEINSHVAHTKPVWWSLHMDTHEIWCRDSDRGTSLGRSIPCTPVLVLSRFKKIKACYHSPATSWPFKTYKLSLQLPHFTCPKTRQALQVSSGAVPYQPNCFAYPPCGAQPVPSFVLNTFLHNSLCRA

SEQ ID NO: 11708 - protein, 191 aa, Homo sapiens
ARRPRPWLSSARTPRRPFWRPPSCCSPMLTTSSETLMMKNIDPSGLETQPFYEVLQSNIQHVLVYENPALQEKALACIPVQELKRKSQEKLSRARKLDKGINISDEDFLLLELLHWFKEEFFHWVNNVLCSKCGGQTRSRDRSLLPSDDELKWGAKEVEDHYCDACQFSNRFPRYNNPEKLLETRCGPWCE

SEQ ID NO: 11709 - protein, 10 aa, Homo sapiens
MFLGLVGLRT

SEQ ID NO: 11710 - protein, 41 aa, Homo sapiens
KQHSSFKNIQSRPFSAMSKLRPWRFWRKENCKASNYLLKKD

SEQ ID NO: 11711 - protein, 165 aa, Homo sapiens
  misc_feature (1)...(165): Xaa = X or * as defined in Table 2
MAPTNCKGSRKCGRPHEQMPHPYLPLLTLFSDSARLHPGEINSRVPHTKPVWWSLHTDAYEIWYHDSDWGDLPWETIPCPPALCSMRKIHLRPQVLRPTSPRNISPISNPEKXNGLKVFXKHTSPSSATNLKRPGQYFYHFPFSEFRPVLGMLQVTSAFQKFTLL

SEQ ID NO: 11712 - protein, 384 aa, Homo sapiens
  DOMAIN (315)..(327): RNase H domain identified by eMATRIX, accession number PF00075C, p-value=7.848e-10, raw score of 11.58
  DOMAIN (213)..(383): Reverse transcriptase domain identified by PFam, accession name rvt, E-value=2.9e-06, PFam score of 19.2
  misc_feature (1)...(384): Xaa = X or * as defined in Table 2
MEVYTQKAYWRVPLGSTVGDQGGHGRFIHPFAIKIEQGSTNRCPSGSPATKYVLLCLHGEKVDLLPADQQSIFSPGRSTQGHLISITGVLMNRHSTYMDKEKVKMVTALWTDEELSKLTWTRMKFDAMTQLGDLPWEINPLSSCSLLREKDPPTTSGPQTDQPKEHLTNFKSTTNHAPLTIPLKPNHSYPAECQYPVPQHALKGLKSIITRLLQHGLLKPINCPYNSPILPVLKPDKAYRLLQDLRLINQIVLSIHPVLPKPNTLLSSIPPSTTHYSVLDLKHAFFTIPLHLSSQPLFAFTWTDPDTHQAQQITWAVLPQGFTDSPHYFNQAQISSSSVTYLGIILMKTHVLSLLIVSGXESIWFWQHGVDRQNNLVDKAQILK

SEQ ID NO: 11713 - protein, 75 aa, Homo sapiens
  misc_feature (1)...(75): Xaa = X or * as defined in Table 2
AQACMYTSRWPEATEEPQKKXKWLVPALTDDITLXHSFSGTVSLRSSPLSTLXPPPLPAREQPPLTVIFHHLPKS

SEQ ID NO: 11714 - protein, 169 aa, Homo sapiens
MNMNIKKIVKQATVLTFTTALLAGGATQAFAKENNQKAYKETYGVSHITRHDMLQIPKQQQNEKYQVPQFDQSTIKNIESAKGLDVWDSWPLQNADGTVAEYNGYHVVFALAGSPKDADDTSIYMFYQKTAPSPGQATVPILPQPPLLHPIILLSPPLLTPSPAYSFVP

SEQ ID NO: 11715 - protein, 415 aa, Homo sapiens
  misc_feature (1)...(415): Xaa = X or * as defined in Table 2
MGKGRRSLWLLPADGGSSGNGNELQGTSPHDYFSIAIKSTHIGLEYPTSRQSNRVSPQSKRIRQPLGLPSGSITERGPPNNRQKGYTRQQFCHESTPNKGDRVIYNLTCLLYCCVRFPLAGTGPHILYLSRLASNLELFKRDKGRGEQRKEEVTCFHKLLAEKENNPPFSFIYPNPIKRPHPYLPSLTLFSDSAHLHPGEINSFMAHTKPVWWSLHTDAHEIWCRDSDRGTSLGRSILRPPALCSMRKIHLRPQVLRLISPRNISPISNPHALKGLKPVITRLLQHGLLKPINSPYNSPILPVLKPDKPYKLVQDLCLINQIVLPIHPMMPNPYTLLSSIPPCHNPLFCSGSQTCFLYYSFVPVIPASLRFHLDXPXHSSWFSKLPGLYCRKASQTAPITSVKPKFHPHLLPISA

SEQ ID NO: 11716 - protein, 189 aa, Homo sapiens
  misc_feature (1)...(189): Xaa = X or * as defined in Table 2
KWPYCPSSAGQQTQLCSSSTNSNNCLPYRGTSLGRSIPCPPALCSMRKMPPTTSGPQTDQPKKHLTISNPVAEAKGIVKVNAPFSLSDPPKISXRLGSFSSNHPYLGQRQYPIPQQALKGLKPVITCLLQHVLLKPVNSPYNSPILPVQKLDMPYRLVQDLCLINQIVLPIHAMVPNPETFIPLTVLNP

SEQ ID NO: 11717 - protein, 167 aa, Homo sapiens
KRPHPYLPLLTLFSDSAHLHPGEINNHVAHTRPVWWSLHTDVHEIWCRDSDQGTFPWEINPPSSCSLLREKDPPTTSGPQTDQTKKHLTNFKSGKRPLFTPSPTSLTIPQPLSPFNLGATLQSLPSLNFNSFHFLVFTKETCFIHEPKTPAPVTDWEGSLPLVFNHC

SEQ ID NO: 11718 - protein, 344 aa, Homo sapiens
  DOMAIN (310)..(321): RNase H domain identified by eMATRIX, accession number PF00075B, p-value=1.346e-09, raw score of 12.56
MWIPPQFMTCTFQCGRSSCTLAHLSHDWGSQEMLHWNMGSRKLKQPWDVLALRACDGKGGTDSAPLHPGEIKSFIAHTKPVWWSLHTDAHEIWCRDSDRGDLPWEINPLSSCSLLHEKDPPTTSGPQTNQPKELLTNFKSVPTPSVAESFQSSFSTDPSDPSSPPQAAPRQAKPGPNSSSASAPRPYNPFITSPPHTWSGLQFHSATSPPPPAQQFPLKKVAQVKGIVKHALKRLKPVITRLLQHGLLKPINSPYNSPILPVLKPGKPYKLVQDLRLINQIVLPIHPVVPNPYTLLSSIPASTTHYSVLDLKHAFFTIPLHPSSQPFFAFTWTDPDTHQAQQIT

SEQ ID NO: 11719 - protein, 74 aa, Homo sapiens
  misc_feature (1)...(74): Xaa = X or * as defined in Table 2
RDLHMKTITSKVYXLTIHXSGSVGRDYELHENPLVGPNIKLGDFVDISHPNDEYSPLLLQVKSLKEDLQKETIS

SEQ ID NO: 11720 - protein, 93 aa, Homo sapiens
FSFLVFSSPLLVFLCEQDCFHHCRKHLLSLVGFSELAFCSDQLILSDGTLQRCLRGCASAPRSCWFCWLPGPLDRVLSQTALRVHSHPRKAVV

SEQ ID NO: 11721 - protein, 218 aa, Homo sapiens
  misc_feature (1)...(218): Xaa = X or * as defined in Table 2
FQIAGKWHFQFFHPTRSKXFLSXNXQMVXGAXCPGILLHISPFLVSVPSATRPKSSFFPSHLSPQYQPQVSLSLSNLPFLQTHVTSAFLPRLLLARPSXVPSRSSASALSTLQSLYHLPSSHLVRLTVSFRDYPSPTCPAIYSXKGGWSQRHSQGXCSFSLYPKSDSVXALFHQIXKSSPVHGSFGSNPKTLYSPSPXKVKRPSYSQYTFYYPICSRH

SEQ ID NO: 11722 - protein, 396 aa, Homo sapiens
NLVVSIRHMEETNSSSKDMYQSPGEAEGWRWKKGSDRGQNLFRKHSKCLILLIRERFESPHSYICSPVTFQFFYAQSVKHVNVTIDCLPEGAATRGTARTSKPTTKSQKTLPSTSPGHWTQSTPWASALRSSPWTETAAPSETEETLNTGRPPELPARATATWFSASHTLPALATRRVARTQWLTADRQTWASISSVPWAQTISEKKPGGSLWETRSSPPTTAGTEEAMNTTSLLAPAAEIMATPGSPSQASPTSGAFTHGTQTPSPTKATAPRYPQTGDLSAEWPFTAGEEPVLVPRPHQVSRCPQPLFKVGAMAAAPLTLAIQRLNPCLMELCQFFQQCLCMSQRSPRTEDMRYCLEYYSWFLKNATYICQRVKRVSHSHTLKQKCLENICKSV

SEQ ID NO: 11723 - protein, 354 aa, Homo sapiens
  DOMAIN (42)..(94): Gag P30 core shell protein domain identified by PFam, accession name Gag_p30, E-value=1.3e-06, PFam score of 26.5
  misc_feature (1)...(354): Xaa = X or * as defined in Table 2
VLQTFAVSVTAHKGGTPRVVCSSQWVRGLADFRNEAADPHDQGMDENPTDFLERLRGALVKHMSLSPDLVEGQLILKDKFITQAAPDIERKLQKQNGPSLRDIFFSPQNGYNWRMASFYLPVANKWKILKSLYQILHLGPDWEGPYTVFLSTPMAVEVTGIDSWIHYTQVKAWKADGATSVNPEEHPKYQGEINSHVAHRKPVWWSLHTDVNEIWCRDSDRGTSLGKSHPRSSCVLCSVRKIHLRPQVLRPTSPRNISPILNQELATRAVKSGHXAKECLQPGIPIKPHLICVGPHXKSDCSTSPGSHSQSPWNSGPRLSDWTPSQIFSAXRLKTDTARSPQKPPRPSRMPSFR

SEQ ID NO: 11724 - protein, 36 aa, Homo sapiens
RNKTCWAWQYTPVVPAAWEAKAGGSLQPRSLSPAMG

SEQ ID NO: 11725 - protein, 101 aa, Homo sapiens
  DOMAIN (34)..(86): Ubiquitin domain proteins domain identified by eMATRIX, accession number BL00299, p-value=3.186e-12, raw score of 28.84
  DOMAIN (20)..(71): Ubiquitin family domain identified by PFam, accession name ubiquitin, E-value=2.9e-07, PFam score of 27.0
SDIETLDIPEPPPNSGYECQLRLRLSTGKDLKLVVRSTDTVFHMKRRLHAAEGVEPGSQRWFFSGRPLTDKMKFEELKIPKDYVVQVIVSQPVQNPTPVEN

SEQ ID NO: 11726 - protein, 60 aa, Homo sapiens
QICVCVCIYICICLYIYICICLRKWFFKMYVYSTHMDTLQSSDFPCATSCVSLLMRICNG

SEQ ID NO: 11727 - protein, 47 aa, Homo sapiens
HRSLLRLPASVSPTAARAPLCCSSGPHSPAFGSWTFGILPSTLVLSE

SEQ ID NO: 11728 - protein, 132 aa, Homo sapiens
EGTLGSGIPCLSRQCFVSFPLFFLLTGIITIEKEVPLSMYVSASRMSSEREMTQCLTQAPGSLATSFFYPVFMTEKGKPCSDNRHFRQPCWLSTPAWPPPPSTLPLCPPRPPTSTKQGGVGDICGIPTFNLW

SEQ ID NO: 11729 - protein, 89 aa, Homo sapiens
AAEGRGPAQGFHSLQRFLPSVNGIKPKCIIFLAWATLYQPGSREHRRSRPIPEPFLPKAEPPTTAWEACFQDLLEPGAIRQDQLIRTES

SEQ ID NO: 11730 - protein, 56 aa, Homo sapiens
IFTWINELFAQILLKLYLVPIKLMDTVYMSIYLSLELCFVISPFLLTGIYLNLYIY

SEQ ID NO: 11731 - protein, 45 aa, Homo sapiens
ALSKTIDVARNLERRHTHAHTHTHTHTHTHTHTHSFFLPCDEKGL

SEQ ID NO: 11732 - protein, 1555 aa, Homo sapiens
TGAQSLLTCQVFILSCFFFFLNEVKMPIRPDLQQLEKCIDDALRKNDFKPLKTLLQIDICEDVKIKCSKQFFHKVDNLICRELNKEDIHNVSAILVSVGRCGKNISVLGQAGLLTMIKQGLIQKMVAWFEKSKDIIQSQGNSKDEAVLNMIEDLVDLLLVIHDVSDEGKKQVVESFVPRICSLVIDSRVNICIQQEIIKKMNAMLDKMPQDARKILSNQEMLILMSSMGERILDAGDYDLQVAIVEALCRMTTEKQRQELAHQWFSMDFIAKAFKRIKDSEFETDCRIFLNLVNGMLGDKRRVFTFPCLSAFLDKYELQIPSDEKLEEFWIDFNLGSQTLSFYIAGDNDDHQWEAVTVPEEKVQIYSIEVRESKKLLTIILKNTVKISKREGKELLLYFDASLEITNVTQKIFGATKHRESIRKQGISVAKTSLHILFDASGSQILVPESQISPVGEELVSLKEKSKSPKEFAKPSKYIKNSDKGNRNNSQLEKTTPSKRKMSEASMIVSGADRYTMRSPVLFSNTSIPPRRRRIKPPLQMTSSAEKPSVSQTSENRVDNAASLKSRSSEGRHRRDNIDKHIKTAKCVENTENKNVEFPNQNFSELQDVIPDSQAAEKRDHTILPGVLDNICGNKIHSKWACWTPVTNIELCNNQRASTSSGDTLNQDIVINKKLTKQKSSSSISDHNSEGTGKVKYKKEQTDHIKIDKAEVEVCRKHNQQQNHPKYSGQKNTENAKQSDWPVESETTFKSVLLNKTIEESLIYRKKYILSKDVNTATCDKNPSASKNVQSHRKAEKELTSELNSWDSKQKKMREKSKGKEFTNVAESLISQINKRYKTKDDIKSTRKLKESLINSGFSNKPVVQLSKEKVQKKSYRKLKTTFVNVTSECPVNDVYNFNLNGADDPIIKLGIQEFQATAKEACADRSIRLVGPRNHDELKSSVKTKDKKIITNHQKKNLFSDTETEYRCDDSKTDISWLREPKSKPQLIDYSRNKNVKNHKSGKSRSSLEKGQPSSKMTPSKNITKKMDKTIPEGRIRLPRKATKTKKNYKDLSNSESECEQEFSHSFKENIPVKEENIHSRMKTVKLPKKQQKVFCAETEKELSKQWKNSSLLKDAIRDNCLDLSPRSLSGSPSSIEVTRCIEKITEKDFTQDYDCITKSISPYPKTSSLESLNSNSGVGGTIKSPKNNEKNFLCASESCSPTPRPLFLARHTPTKSNTIVNRKKISSLVLTQETQNSNSYSDVSRYSSEERFMEIESPHINENYIQSKREESHLASSLSKSSEGREKTWFDMPCDATHVSGPTQHLSRKRIYIEDNLSNSNEVEMEEKGERRANLLPKKLCKIEDADHHIHKMSESVSSLSTNDFSIPWETWQNEFAGIEMTYETYERLNSEFKRRNNIRHKMLSYFTTQSWKTAQQHLRTMNHQSQDSRIKKLDKFQFIIIEELENFEKDSQSLKDLEKEFVDFWEKIFQKFSAYQKSEQQRLHLLKTSLAKSVFCNTDSEETVFTSEMCLMKEDMKVLQDRLLKDMLEEELLNVRRELMSVFMSHERNANV

SEQ ID NO: 11733 - protein, 183 aa, Homo sapiens
WSCSNKKYPLPPGNLMQSLLPEEAEPCHREISSFYVSEPQQGDQDRVSSEEKQHEQLWQQRHTSAAAPPSAAAPHVLCNPKSVLKRPVTSEELLTPGAPYARKTFTIVGDAVGWGFVVRGSKPCHIQAVDPSGPAAAAGMKVCQFVVSVNGLNVLHVDYRTVNNLILTGPRTIVMEVMEELEC

SEQ ID NO: 11734 - protein, 84 aa, Homo sapiens
  DOMAIN (11)..(35): INTERLEUKIN-7 SIGNATURE domain identified by eMATRIX, accession number PR00435A, p-value=7.517e-09, raw score of 9.37
NSLGEIGIKPFLLKVPFCFGLPPPKLLLLFVAFSSRLWALPSCFGLTPHFPGFPSHFLTRISSCICLPLFLPSFLSCLFFFEYN

SEQ ID NO: 11735 - protein, 33 aa, Homo sapiens
WESHISPPFNGIYIHTHTHTHTHFLLKVYLQIC

SEQ ID NO: 11736 - protein, 54 aa, Homo sapiens
  DOMAIN (12)..(42): kw TRANSCRIPTASE REVERSE II ORF2 domain identified by eMATRIX, accession number DM01354M, p-value=8.890e-17, raw score of 12.50
RETDKTLASLKKRVKTQINKIINEIRGVTTDTTEVQRIIRDTLNNPVGRSTGRE

SEQ ID NO: 11737 - protein, 49 aa, Homo sapiens
AADVLIGQSQHIQHPCWPPFSKPSCAPKVGQPALPLPDPLAVRALHVLT

SEQ ID NO: 11738 - protein, 74 aa, Homo sapiens
FSPWSWVCCYGHWTSSAQVGSRPLLPSASVSPVSTWPLCCLLQGGLLAYTIFHTQRLCGPFPILLPIPSLHSST

SEQ ID NO: 11739 - protein, 66 aa, Homo sapiens
IIEIGIMEQRKPWKKICYFICCASHAKGSLCRRMKRAPVYYGRTVPSPDGSIAHGEYHVLLELNTE

SEQ ID NO: 11740 - protein, 45 aa, Homo sapiens
LKINERGRAQWLRPILPAPWEAESGGSFGPRSSRTAWGISGEASS

SEQ ID NO: 11741 - protein, 147 aa, Homo sapiens
VLNTINSSLHSVQGTSVLSPFLHIGSVITLAAMIYKKSAVQLFEKHPCLYILTFGFVSAKITNKLVVAHMTKSEMHLHDTAFIGPALLFLDQYFNSFIDEYIVLWIALDFSFFDLIRYCVSVCNQIASHLHIHVFRIKVSTAHSNHH

SEQ ID NO: 11742 - protein, 406 aa, Homo sapiens
  DOMAIN (216)..(231): WILM'S TUMOUR PROTEIN SIGNATURE domain identified by eMATRIX, accession number PR00049D, p-value=2.857e-10, raw score of 0.00
  DOMAIN (330)..(394): bZIP transcription factor domain identified by PFam, accession name bZIP, E-value=5.5e-05, PFam score of 23.0
DWEGDPPEGPATSPLTNSGHPGSGGSSSSDAAATAQSREAAPPAGRPERAAPGPLPGHPAFMQRLVAWDPACLPLPPPPPAFKSMEVANFYYEADCLAAAYGGKAAPAAPPAARPGPRPPAGELGSIGDHERAIDFSPYLEPLGAPQAPAPATATDTFEAAPPAPAPAPASSGQHHDFLSDLFSDDYGGKNCKKPAEYGYVSLGRLGAAKGALHPGCFAPLHPPPPPPPPPAELKAEPGFEPADCKRKEEAGAPGGGAGMAAGFPYALRAYLGYQAVPSGSSGSLSTSSSSSPPGTPSPADAKAPPTACYAGAAPAPSQVKSKAKKTVDKHSDEYKIRRERNNIAVRKSRDKAKMRNLETQHKVLELTAENERLQKKVEQLSRELSTLRNLFKQLPEPLFASSGHC

SEQ ID NO: 11743 - protein, 116 aa, Homo sapiens
MGNFFFFEPGTCYVAQAGLELLNSSDPLTSASQIAETTGTHHCTWLKTIFLKNKSTALHLYLLVSLQFKHTINDYNILFKAGRSGSWLQLEQFITSGYLRARKIQKKKKLGVCNTV

SEQ ID NO: 11744 - protein, 38 aa, Homo sapiens
  misc_feature (1)...(38): Xaa = X or * as defined in Table 2
RCWLCPHALFLWLASHLCHFYTFECVQAECXVMPPHPL

SEQ ID NO: 11745 - protein, 144 aa, Homo sapiens
EGGGASLNIQPVHTQRCRSDKDDSTNRTSHDWPARGRGHEDTASSSYWVVMTQTCRDTPVGSRHWMGLRAEAGALAGMALEATCLALQGSLLEASMKRSFPWATHCLAPQRRTTQPALPRIFLVLALNVHSLRNPSVSGKWDVW

SEQ ID NO: 11746 - protein, 94 aa, Homo sapiens
VLFLVPIYIHKLVYIPYLQKHASNHIQKEQKVMGNFLFYNKALLSFWTYFTSLERLSAHTSTIIFFLLCQLFSAHVLHQKWHLDDRSSKSHICL

SEQ ID NO: 11747 - protein, 100 aa, Homo sapiens
  misc_feature (1)...(100): Xaa = X or * as defined in Table 2
WPRSGPLRLLRTVCCCVLPLLSHSKLHKISVSAPGPXXQIPPPFQNRSFSCDTERGXGGETPLVPGKFSSPHQTLLXGTSSGRTGSAGQLPLLYLSYKTR

SEQ ID NO: 11748 - protein, 45 aa, Homo sapiens
MRKQLLLPQKKRRVYLLRITKKVEMIPQDNENPGNTNCHDVVLVQ

SEQ ID NO: 11749 - protein, 538 aa, Homo sapiens
  DOMAIN (118)..(168): Protein prenyltransferases alpha subunit repeat proteins proteins domain identified by eMATRIX, accession number BL00904A, p -value=9.723e-11, raw score of 8.30
MSLHGKRKEIYKYEAPWTVYAMNWSKGKVKEAAQRYQYALKKFPREGFGEDLKTFRELKVSLLLNLSRCRRKMNNNSSSCVHILSSRQFAAALEDLNEAIKLCPNNREIQRLLLRVEEECRQMQQPQQPPPPPQPQQQLPEEAEPEPQHEDIYSVQDIFEEDPPPVGGQGKEYPSPPPSPLRRGPQYRASPPAESMSVYRSQSGSPVRYQQETSRPYQMPQLPVAVPQQGLRLQPAKAQIVRSNQPSPAVHSSTVIPTGAYGQVAHSMASKYQSSQGDIGVSQSRLVYQGSIGGIVGDGRPVQHVQASLSAGAICQHGGLTKEDLPQRPSSAYRGGVRYSQTPQIGRSQSASYYPVCHSKLDLERSSSQLGSPDVSHLIRRPISVNPNEIKPHPPTPRPLLHSQSVGLRFSPSSNSISSTSNLTPTFRPSSSIQQMEIPLKPAYESNIAFYNKTNNAQNGHLLEDDYYSPHGMLANGSRGDLLERVSQASSYPDVKVARTLPVAQAYQDNLYRQLSRDSRQGQTSPIKPKRPFVESNV

SEQ ID NO: 11750 - protein, 191 aa, Homo sapiens
  DOMAIN (93)..(143): Protein prenyltransferases alpha subunit repeat proteins proteins domain identified by eMATRIX, accession number BL00904A, p -value=5.979e-09, raw score of 8.30
  misc_feature (1)...(191): Xaa = X or * as defined in Table 2
KGKVKEAAQRYQYALKKFPREGFGEDLKTFRELKVSLLLNLSRCRRKMNNNSSSCVHILSSRQFAAALEDLNEAIKLCPNNREIQRLLLRVEEECRQMQQPQQPPPPPQPQQQLPEEAEPEPXRTXTRPSSCVPTTVRSRDFCXEWKKSVDTMQQPQQPPPPPQPQQQLPEEAEPEPQHEDIYSVQDIFEE

SEQ ID NO: 11751 - protein, 324 aa, Homo sapiens
RPYQMPQLPVAVPQQGLRLQPAKAQIVRSNQPSPAVHSSTVIPTGAYGQVAHSMASKYQSSQGDIGVSQSRLVYQGSIGGIVGDGRPVQHVQASLSAGAICQHGGLTKEDLPQRPSSAYRGGVRYSQTPQIGRSQSASYYPVCHSKLDLERSSSQLGSPDVSHLIRRPISVNPNEIKPHPPTPRPLLHSQSVGLRFSPSSNSISSTSNLTPTFRPSSSIQQMEIPLKPAYESNIAFYNKTNNAQNGHLLEDDYYSPHGMLANGSRGDLLERVSQASSYPDVKVARTLPVAQAYQDNLYRQLSRDSRQGQTSPIKPKRPFVESNV

SEQ ID NO: 11752 - protein, 65 aa, Homo sapiens
HGALERTRTTYPQSLFSALSPNSCSRKWQTGGVPFALGTRGGSGPAKPPRSSATIQHSAPGPLCR

SEQ ID NO: 11753 - protein, 1471 aa, Homo sapiens
  DOMAIN (851)..(901): Protein prenyltransferases alpha subunit repeat proteins proteins domain identified by eMATRIX, accession number BL00904A, p -value=2.021e-09, raw score of 8.30
  DOMAIN (351)..(697): Ank repeat domain identified by PFam, accession name ank, E- value=5.9e-57, PFam score of 202.6
DEDFIILIDGLNEAEFLKPDYGDTIVLFLSKMMGKFPSWLKIIVTVRTSLQEITKLLPFHRIFLDRLEENEAIDQDLQAYILHRIHSSSEIQNNISLNGKMDNTTFGKLSSHLKTLSQGSYLYLKLTFDLIEKGYLVLKSSSYKVVPVSLSEVYLLQCNMKFPTQSSFDRVMPLLNVAVASLHPLTDEHIFQAINAGSIEGTLEWEDFQQRMENLSMFLIKRRDMTRMFVHPSFREWLIWREEGEKTKFLCDPRSGHTLLAFWFSRQEGKLNRQQTIELGHHILKAHIFKGLSKKVGVSSSILQGLWISYSTEGLSMALASLRNLYTPNIKVSRLLILGGANINYRTEVLNNAPILCVQSHLGYTEMVALLLEFGANVDASSESGLTPLGYAAAAGYLSIVVLLCKKRAKVDHLDKNGQCALVHAALRGHLEVVKFLIQCDWTMAGQQQGVFKKSHAIQQALIAAASMGYTEIVSYLLDLPEKDEEEVERAQINSFDSLWGETALTAAAGRGKLEVCRLLLEQGAAVAQPNRRGAVPLFSTVRQGHWQIVDLLLTHGADVNMADKQGRTPLMMAASEGHLGTVDFLLAQGASIALMDKEGLTALSWACLKGHLSVVRSLVDNGAATDHADKNGRTPLDLAAFYGDAEVVQFLVDHGAMIEHVDYSGMRPLDRAVGCRNTSVVVTLLKKGAKIGPATWAMATSKPDIMIILLSKLMEEGDMFYKKGKVKEAAQRYQYALKKFPREGFGEDLKTFRELKVSLLLNLSRCRRKMNGESQNSPWTFIVSLDFGMAEEFATKALELKPKSYEAYYARARAKRSSRQFAAALEDLNEAIKLCPNNREIQRLLLRVEEECRQMQQPQQPPPPPQPQQQLPEEAEPEPQHEDIYSVQDIFEEEYLEQDVENVSIGLQTEARPSQGLPVIQSPPSSPPHRDSAYISSSPLGSHQVFDFRSSSSVGSPTRQTYQSTSPALSPTHQNSHYRPSPPHTSPAHQGGSYRFSPPPVGGQGKEYPSPPPSPLRRGPQYRASPPAESMSVYRSQSGSPVRYQQETSVSQLPGRPKSPLSKMAQRPYQMPQLPVAVPQQGLRLQPAKAQIVRSNQPSPAVHSSTVIPTGAYGQVAHSMASKYQSSQGDIGVSQSRLVYQGSIGGIVGDGRPVQHVQASLSAGAICQHGGLTKEDLPQRPSSAYRGGVRYSQTPQIGRSQSASYYPVCHSKLDLERSSSQLGSPDVSHLIRRPISVNPNEIKPHPPTPRPLLHSQSVGLRFSPSSNSISSTSNLTPTFRPSSSIQQMEIPLKPAYERSCDELSPVSPTQGGYPSEPTRSRTTPFMGIIDKTARTQQYPHLHQQNRTWAVSSVDTVLSPTSPGNLPQPESFSPPSSISNIAFYNKTNNAQNGHLLEDDYYSPHGMLANGSRGDLLERVSQASSYPDVKVARTLPVAQAYQDNLYRQLSRDSRQGQTSPIKPKRPFVESNV

SEQ ID NO: 11754 - protein, 66 aa, Homo sapiens
LEAAEAPSRERTAQQCPPSPPPHPSHPLVFSPPEGPPRVNGFPCPRCGGQRKGEADPGAGRGWPGS

SEQ ID NO: 11755 - protein, 49 aa, Homo sapiens
FQGGEGEQADPKRHEPVCVIVITHQQGPDGKAQEDEMEKLIIFLYIQSS

SEQ ID NO: 11756 - protein, 25 aa, Homo sapiens
SSSFKTSGSPCPGPEEEEDEEDEED

SEQ ID NO: 11757 - protein, 89 aa, Homo sapiens
  DOMAIN (54)..(65): PROTEIN REPEAT MUSCLE CALCIUM-BI domain identified by eMATRIX, accession number PD00301A, p-value=6.400e-09, raw score of 10.24
SSSFKTSGSPCPGPGEPFPWGYPAPRLRRCFPVALGCWSSSLLSEEEEDEEDEEDEEEEEEEEEDLFLSYCSWEKSPAFPSCLWKSVSP

SEQ ID NO: 11758 - protein, 75 aa, Homo sapiens
  DOMAIN (40)..(51): PROTEIN REPEAT MUSCLE CALCIUM-BI domain identified by eMATRIX, accession number PD00301A, p-value=6.400e-09, raw score of 10.24
PRRVPPPPRSISHRVEAHPSKRQAPHAPGPEEEEDEEDEEDEEEEEEEEEDLFLSYCSWEKSPAFPSCLWKSVSP

SEQ ID NO: 11759 - protein, 718 aa, Homo sapiens
  DOMAIN (9)..(20): PROTEIN REPEAT MUSCLE CALCIUM-BI domain identified by eMATRIX, accession number PD00301B, p-value=4.808e-09, raw score of 5.49
MKKKKMKEEEEKEKKEEEEEEEEEERRKEEDDFCNRTSPAGGSEGPGQESEQPAQPPEQAGGRPGASPAPDEDAEAAGAEQGGDSTEATAKPKRSFYAARDLYKYRHQYPWKLSQFHSSVSHRRKEIDCKAFKWQDLAFFGELTRGKRSQHNYLRITRILKSLGELGYESFKSPLVKFILHEALVENTIPNIKQSALEYFVYTIRDRRERRKLLRFAQKHYTPSENFIWGPPRKEQSEGSKAQKMSSPLASSHNSQTSMHKKAKDSKNSSSAVHLNSKTAEDKKVAPKEPVEETDRPSPEPSNEAAKPRNTEKDSNAENMNSQPEKTVTTPTEKKESVSPENNEEGGNDNQDNENPGNTNCHDVVLPRSPAPAAASSMGNLLGGVSFREPTTVEDCDSTWQTDSEPEPEEPGPGGGSEGPGQESEQPAQPPEQAGGRPGASPAPDEDAEAAGAEQGGDSTEATAKPKRSFYAARDLYKYRHQYPQNFKDIRYQNDLSNLRFYKNKIPFKPDGVYIEEVLSKWKGDYEKLEHNHTYILWLLPLTEQGLNFYAKELTTYEIDESSKTKEAIIRFPPWAYKNDARIFWNKTGLIKLGMFARGVYWQESFQHLNESQHNYLRITRILKSLGELGIESFKSPLVKFILHEALVGGILFPILRQSALEYFVYTIRRTGRRKGRKALCGFAPWKHYTAFQGNFIWGDPPSEKEQFGGGGQRPREM

SEQ ID NO: 11760 - protein, 605 aa, Homo sapiens
  DOMAIN (260)..(276): pfkB family of carbohydrate kinases proteins domain identified by eMATRIX, accession number BL00583A, p-value=4.545e- 10, raw score of 13.61
  DOMAIN (261)..(348): pfkB family carbohydrate kinase domain identified by PFam, accession name pfkB, E-value=2.1e-33, PFam score of 109.5
MTLVAYERYFNAEDDYTRESALQEHIASVRNHIRLLGRKDYQQESAAYLDRVSAHIRDPRYPWELRLMISAPGSGNDTVILKLTWAFTVSVGTALTWNWNAQCANFQLSGYIPRHGPCNNHFPGEPEDWAIFTSPQKGHTGREKRGIKIMRGISKVAQRCPVFKSDAARTRQRLSARKGRTLPPGRGKFPHSTTESFRNTFWLKKIMEHCFNMVDQQTTTAQTNANFLQIRFTTMSKKIAVIGECMIELSEKGADVKRGFGGDTLNTSVYIARQVDPAALTVHYVTALGTDSFSQQMLDAWHGENVDTSLTQRMENRLPGLYYIETDSTGERTFYYWRNEAAAKFWLEMSITLRRDTRSGGSSSEGIIQFFFEETQDENGFNIYILDESNRVEVYHHCEGSKEELVRDVSRFYSSSHDRFTYGSSFINFNLPQFYQIVKVDGREQQIPEGFAAAITNPLIAFQVKMVAALFGCQPYLVQRLLAVDNDFAAILKGNGQYAAVDFAVDIAVAIPVVQAFFNGQPELISQAMKFPVVHCCILFLSDCGSLAAWGPGSKLCLWGGFAGISGRIARFQERIKWVYELFPRLHERRIQRAGTMSGGEQQRN

SEQ ID NO: 11761 - protein, 428 aa, Homo sapiens
  DOMAIN (305)..(337): ABC transporters family proteins domain identified by eMATRIX, accession number BL00211B, p-value=8.286e-21, raw score of 13.37
  DOMAIN (33)..(184): Pyridoxal-dependent decarboxylase conse domain identified by PFam, accession name pyridoxal_deC, E-value=7.5e-67, PFam score of 232.3
MDKKQVTDLRSELLDSRFGAKSISTIAESKRFPLHEMRDDVAFQIINDELYLDGNARQNLATFCQTWDDENVHKLMDLSINKNWIDKEEYPQSAAIDLRCVNMVADLWHAPAPKNGQAVGTNTIGSSEACMLGGMAMKWRWRKRMEAAGKPTDKPNLVCGPVQICWHKFARYWDVELREIPMRPVRLQQSVPHVLVVEFQTMQENHFLQRYGFFLSAVIRKTQYTLGHQLQQHHLGMSQLSCNPLSSPRGITRWCLGERLSRSSTRVEGILRGRISPDGFQERIKWVYELFPRLHERRIQRAGTMSGGEQQMLAIGRALMSNPRLLLLDEPSLGLAPIIIQQIFDTIEQLREQGMTIFLVEQNANQALKLADRGYVLENGHVVLSDTGDALLANEAAYWVSGNMLNLHDLVGLIRRLRRIRHETMSNL

SEQ ID NO: 11762 - protein, 550 aa, Homo sapiens
  DOMAIN (35)..(82): Bacterial regulatory proteins tetR family proteins. domain identified by eMATRIX, accession number BL01081, p-value=9.113e-12, raw score of 28.63
  DOMAIN (269)..(451): ABC transporter domain identified by PFam, accession name ABC_tran, E-value=1.8e-55, PFam score of 197.7
MFILWYSASSTFGKDSDIVMGVRAQQKEKTRRSLVEAAFSQLSAERSFASLSLREVAREAGIAPTSFYRHFRDVDELDPNFGEKGNMAPLDCFGRTRAVASRVKLLGIEEVIELNPPLFDLFLKHDAMHDPMVNESYCETFGWVSKENLARMKELTYKANDVLKKLFDDAGLILVDFKLEFGLYKGEVVLGDEFSPDGSRLWDKETLEKMDKDRFRQSLGGLIEAYEAVARRLGVRHKMEKVMLSFDKVSAHYGKIQALHEVSLHINQGEIVTLIGANGAGKTTLLGTLCGDPRATSGRIVFDDKDITDWQTAKIMREAVAIVPEGRRVFSRMTVEENLAMGGFFAERDQFQERIKWVYELFPRLHERRIQRAGTMSGGEQQMLAIGRALMSNPRLLLLDEPSLGLAPIIIQQIFDTIEQLREQGMTIFLVEQNANQALKLADRGYVLENGHVVLSDTGDALLANEASERKLWLEMLSPPKDDSKDPQAKLFITAATEGRGMDALREHLLQLPEREHASQHSFRLAIDRAFTVKGAGLVVTGTALSGEVK

SEQ ID NO: 11763 - protein, 535 aa, Homo sapiens
  DOMAIN (362)..(394): ABC transporters family proteins domain identified by eMATRIX, accession number BL00211B, p-value=8.286e-21, raw score of 13.37
  DOMAIN (276)..(437): ABC transporter domain identified by PFam, accession name ABC_tran, E-value=1e-28, PFam score of 108.8
PMYLFLCPPLALVQCALKDPRSKYSLGGRTTLIITLQGSGKKNNIPHPSSLSERVMTAKDGFVSRCHLLMQPKQQKWSLMYPMEGEVLENGCWPTLQDSLLCTALVDKLLVFLGRCFCTAVEVVMLVTCRTAAAVSAFLIVGRVSSPVCRAVSVQPWTLTADHTPGRYCLKLVCRQLCLCPSSTPLTEVFCSKEAFFIILDCSNLPHALLPVDSPKGLSKCSNPREKARRKLQGHYHVASEVSFVPVRRFPKGEIGANQPGTHRKFYHLTHYRQNLKQPDVPHGRIVFDDKDITDWQTAKIMREAVAIVPEGRRVFSRMTVEENLAMGGFFAERDQFQERIKWVYELFPRLHERRIQRAGTMSGGEQQMLAIGRALMSNPRLLLLDEPSLGLAPIIIQQIFDTIEQLREQGMTIFLVEQNANQALKLADRGYVLENGHVVLSDTGDALLANEAVRRGDELTEDRSRSLDGELIRSLPCGASYGGLSLRPWSRGHIPQSHQSSESVRVMFINTSKGASIISSSATMPGPLPKHLGP

SEQ ID NO: 11764 - protein, 35 aa, Homo sapiens
FNVGGKGNSGLRCIPLLCLLFRLKRKRRKMRQRSK

SEQ ID NO: 11765 - protein, 101 aa, Homo sapiens
  misc_feature (1)...(101): Xaa = X or * as defined in Table 2
HHHSKLTVTLSPPFPCKKPLPPMKAKLVEERKRNARGXSAKRRKMRQRSQVNPPSFVAPVEATQEHETWNAQTLGMLGTSCGTACYCLELVSMGSRTSSAL

SEQ ID NO: 11766 - protein, 45 aa, Homo sapiens
DVNVLIYTVILKEALWLMSVISALCDAEAGELLEAKSLRPAWVTK

SEQ ID NO: 11767 - protein, 30 aa, Homo sapiens
LRGVWGGRGWAGGVPALGPCRGCGPQGRRG

SEQ ID NO: 11768 - protein, 34 aa, Homo sapiens
  misc_feature (1)...(34): Xaa = X or * as defined in Table 2
TYVXPSVFKVNXHPTXSSSXHRKDQTDILNAINQ

SEQ ID NO: 11769 - protein, 466 aa, Homo sapiens
  DOMAIN (1)..(44): Ribosomal protein S26e proteins domain identified by eMATRIX, accession number BL00733A, p-value=1.000e-40, raw score of 11.62
  DOMAIN (1)..(114): Ribosomal protein S26e domain identified by PFam, accession name Ribosomal_S26e, E-value=8e-74, PFam score of 258.7
MTKKRRNNGRAKKGRGHVQPIRCTNCARCVPKDNAIKKFVIRNIVEAAAVRDISEASVFDAYVLPKLYVKLHYCVSCAIHSKVVRNRSREARKDRTPPPRFRPAGAAPRPPPKPMSGAGRGRSHLDEGREGAGDEVGELSLQQEIDKDPLGGALGAGSRGTKTTGMQAGIGGGEQVLVFWDSSLPAVVDSCFHPVPSPDTSAALSWCLLSFSRTPQQPSPGNFRPEHLPLLFLSTVLPQSVAQTQASGKYLPSRWSQDRCGESREAPLPSKTLEGETPEGVGAELRCVRLPGPEWNSVLKPGFSLQLDSSSARMALVFVYGTLKRGQPNHRVLRDGAHGSAAFRARGRTLEPYPLVIAGEHNIPWLLHLPGSGRLVEGEVYAVDERMLRFLDDFESCPALYQRTVLRVQLLEDRAPGAEEPPAPTAVQCFVYSRATFPPEWAQLPHHDSYDSEGPHGLRYNPRENR

SEQ ID NO: 11770 - protein, 86 aa, Homo sapiens
  DOMAIN (51)..(80): Regulator of chromosome condensation (RCC1) proteins domain identified by eMATRIX, accession number BL00625A, p-value=1.761e- 13, raw score of 16.21
  DOMAIN (13)..(77): Regulator of chromosome condensation (RCC1) domain identified by PFam, accession name RCC1, E-value=0.079, PFam score of 11.6
NWKTKIITSMLCWGNASFGQLGLGGIDEEIVLEPRKSDFFINKRVRDVGCGLRHTVFVLDDGTVYTCGCNDLGQLGHEKSRKKPEF

SEQ ID NO: 11771 - protein, 383 aa, Homo sapiens
  DOMAIN (1)..(44): Ribosomal protein S26e proteins domain identified by eMATRIX, accession number BL00733A, p-value=1.000e-40, raw score of 11.62
  DOMAIN (1)..(114): Ribosomal protein S26e domain identified by PFam, accession name Ribosomal_S26e, E-value=1.4e-68, PFam score of 241.2
MTKKRRNNGRAKKGRGHVQPIRCTNCARCVPKANAIKKFVIRNIVEAAAVRDISEASVFDAYVLPKLYVKLHYCVSCAIHSKVVRNRSREARKDRTPPLDLANEKKVDQPPEAKKPKIKVVNVELPIEANLVWQLGKDLLNMYIETEGKMIMQDKLEKERNDAKNAVEEYVYEFRDKLCGPYEKFICEQDHQNFLRLLTETEDWLYEEGEDQAKQAYVDKLEELMKIGTPVKVRFQEAEERPKMFEELGQRLQHYAKIAADFRNKDEKYNHIDESEMKKVEKSVNEVMEWMNNVMNAQAKKSLDQDPVVRAQEIKTKIKELNNTCEPVVTQPKPKIESPKLERTPNGPNIDKKEEDLEDKNNFGAEPPTSGMVNVTPNEENFC

SEQ ID NO: 11772 - protein, 79 aa, Homo sapiens
  DOMAIN (5)..(48): Ribosomal protein S26e proteins domain identified by eMATRIX, accession number BL00733A, p-value=1.000e-40, raw score of 11.62
  DOMAIN (5)..(79): Ribosomal protein S26e domain identified by PFam, accession name Ribosomal_S26e, E-value=4e-20, PFam score of 80.3
RASKMTKIRRNNGRAKKGRGHVQPIRCTNCARCVPKDKAIKKFVIRNIVEAAAVRDISEASVFDGKWVTGANCVRIPVS

SEQ ID NO: 11773 - protein, 146 aa, Homo sapiens
  DOMAIN (71)..(104): Ribosomal protein S26e proteins domain identified by eMATRIX, accession number BL00733B, p-value=4.563e-30, raw score of 12.04
  DOMAIN (17)..(146): Ribosomal protein S26e domain identified by PFam, accession name Ribosomal_S26e, E-value=5.7e-23, PFam score of 89.8
  misc_feature (1)...(146): Xaa = X or * as defined in Table 2
EGPARHRLLSPVRASKMTKKRRNNGRAKKGRAPRQGTAPLKIFPSGPLPPNCARCVPRRDKAIKKFRHSETXWEAAAVRDLSEASVFDAYLLPKLYVKLHYCVSCAIHKQKXSGNRSSXSPAKTRTPPPRFRPAGCWPHGPPTKSP

SEQ ID NO: 11774 - protein, 44 aa, Homo sapiens
DLLGEIIYVYIFIQLMYTYIYVYTQTHTHTTNNHHYTTHAYNRH

SEQ ID NO: 11775 - protein, 40 aa, Homo sapiens
MPTHTHTHTHTHTHKHMLIKLIGWGEANCFQGRWHILEKT

SEQ ID NO: 11776 - protein, 105 aa, Homo sapiens
  DOMAIN (38)..(81): PROTEIN NUCLEAR RIBONUCLEOPROTEIN domain identified by eMATRIX, accession number PD02784B, p-value=7.309e-11, raw score of 26.46
  DOMAIN (3)..(74): RNA recognition motif. domain identified by PFam, accession name rrm, E-value=3.3e-11, PFam score of 50.6
EVLYLKNLSPRVTERDLVSLFARFQEKKGPPIQFRMMTGRMRGQAFITFPNKEIAWQALHLVNGYKLHGKILVIEFGKNKKQRSNLQATSLISCATGSTTEISGS

SEQ ID NO: 11777 - protein, 142 aa, Homo sapiens
NTDKQVVSWRARIASRTQKLRNSKRHFVGHLLAQKPQKQSPGRTHANLNSFSLQQKAQEAKPQAEPCLTLTAQPAQKAQKQSPRQNHANLTAQPAEKHRSKAQAEPMPNLNSLSLCPFKKRERQTDTWGLRLLTQAGLKLTG

SEQ ID NO: 11778 - protein, 100 aa, Homo sapiens
SLPTTSQPVRLQATDTPIPASKRAQLSPEGAGTGQAEEVAQREPPTGRGGGAFRPPTRAGDPRRRDSRSGGRNVPRAPGSRKSGDCPSLLPPQPSAPSPH

SEQ ID NO: 11779 - protein, 74 aa, Homo sapiens; identical to SEQ ID NO: 8521

SEQ ID NO: 11780 - protein, 118 aa, Homo sapiens
LWAEGTLVWGSIREWLQHTPPNGIRDWAKQRMWRTGQPQPAPTRVNISRPSPTPFPRFTTKLMWALGTDPFTHTHTHSHSFAHIHSCTHAHVQEHTYTYSLPHTSRPFLKGSKSTPKP

SEQ ID NO: 11781 - protein, 118 aa, Homo sapiens; identical to SEQ ID NO: 8523

SEQ ID NO: 11782 - protein, 91 aa, Homo sapiens
  DOMAIN (58)..(72): 70 KD HEAT SHOCK PROTEIN SIGNATURE domain identified by eMATRIX, accession number PR00301A, p-value=3.189e-13, raw score of 14.84
LPRSQGFPERTCAAAGTGVLSFRRSEGLSSCRGSRPPFSAPSLIAEPTEQGTGMAKAGEIGIDLGTTYSCVGESHPGNEKIIRFYQINLSF

SEQ ID NO: 11783 - protein, 298 aa, Homo sapiens
FVLAGRRRPLRSRKMSRSGAAAEKADSRQRPQMKVNEYKENQNIAYVSLRPAQTTVLIKTAKVYLAPFSLSNYQLDQLMCPKSLSEKNSNNEVACKKTKIKKTCRRIIPPKMKNTSSKAESTLQNSSSAVHTGKNKLQPKRTADAMNLSVDVESSQDGDSDEDTTPSLNPSSTPPSPPNPGEISMEKVKVKRYVSGKRPDYAPMESSDEEDEEFQFIKKAKEQEAEPEEQEEDSSSDPRLRRLQNRISEDVEESRNGVHHVGGNQRELARQKNMKKQSDSVKGKRRDDGLSAAARKQR

SEQ ID NO: 11784 - protein, 123 aa, Homo sapiens
  DOMAIN (77)..(89): MOLLUSCAN RHODOPSIN C-TERMINAL TAIL SIGNATURE domain identified by eMATRIX, accession number PR00239E, p-value=6.932e- 09, raw score of 1.58
GARPSRPSCFPQLPDPLPSSVFLLWVFVTSSRCLLAGHSSPDPQLCAVPQRTQGSPAQPDLGRRLISPSLLLPHSPLPQGPLPQGPLPQSPCCFKPWEFMAKHRPHLPRADVAQTRGGEKEEA

SEQ ID NO: 11785 - protein, 45 aa, Homo sapiens
MSPDRNIECKATGFTETTIYDLLFCKSVDSFYQLLISSSGSKSIT

SEQ ID NO: 11786 - protein, 106 aa, Homo sapiens
RPVPAKLNPRSWPRTAGALPLRPPPLTMAVFHDEVEIEDFQYDEDSETYFYPCPCGDNFSITKEDLENGEDVATCPSCSLIIKVIYDKDQFVCGRNSPSPFQPTKN

SEQ ID NO: 11787 - protein, 216 aa, Homo sapiens
MQKEDCVIVLVKLAVEGMAPTQQIHLFVAITFSGWPRQCTGSSFKAIDLFLDPDSVMQQIYSFHFGIMCNFDNHAFQNLMAVIDNIKQDRDMDEAGSHHSQQTNTGTGNQTPHVLTHKWELSNENTWTQGGEHHTPGPWVLGLADFKNEVVDPHGVKPQTFTVSVTALKDDVSGIHSFLLVGSWSANFRNEAAEPSALFTIAKIWINLSIHQQMNG

SEQ ID NO: 11788 - protein, 37 aa, Homo sapiens
ETHQYTSKDSIDQDLGFIWMNLFFPLRQDKKERKYWE

SEQ ID NO: 11789 - protein, 75 aa, Homo sapiens
PRSWGQDTTPSRGERSPNSSGTPGLPPPGGHPFPSQPVRPQLLPPTPDLGPGPGGQAGIQGPSGSPTQDGANSRL

SEQ ID NO: 11790 - protein, 47 aa, Homo sapiens
HTKGLATSVFSQHRIPILPECFIVKLDCVCVCVCVCVFYINIQMYVF

SEQ ID NO: 11791 - protein, 45 aa, Homo sapiens
LNQVFLFCLLVFVFLIRCSPIISLEVNTPCVPLRIFSFFKLGHLI

SEQ ID NO: 11792 - protein, 107 aa, Homo sapiens
  DOMAIN (81)..(107): VP6 BLUE-TONGUE VIRUS INNER CAPSID PROTEIN SIGNATURE domain identified by eMATRIX, accession number PR00902D, p-value=8.962e- 09, raw score of 7.82
  misc_feature (1)...(107): Xaa = X or * as defined in Table 2
MGLEKLHPFDAGKWGKVINFLKEEKLLSDSMLVEAREASEEDLLVVHTRRYLNELKRKVLRPLRTQTGGTIMAGKLAVERGWAINVEAIXRKVELEWGTEDDEYLDK

SEQ ID NO: 11793 - protein, 508 aa, Homo sapiens
  DOMAIN (335)..(361): Histone deacetylase family domain identified by eMATRIX, accession number PF00850E, p-value=4.750e-12, raw score of 8.88
  DOMAIN (178)..(487): Histone deacetylase family domain identified by PFam, accession name Hist_deacetyl, E-value=2e-21, PFam score of 84.6
MGEKLAPGNMFEGLDQAVLEVHPCTLGSGTSESEAPDETSLGWRGHWKVKATWGDIPSAATVERVGLGLSIHPSAFTPTLLGAPTTRPIFQIEKLRIGDKSLMMQAPGAQAQAMLNSHEKATYYTIAFMRNVQNRHIYRSKMWINGFQWMPGGRKWVMTAKRLHTTQLYQHVPETRWPIVYSPRYNITFMGLEKLHPFDAGKWGKVINFLKEEKLLSDSMLVEAREASEEDLLVVHTRRYLNELKWSFAVATITEIPPVIFLPNFLVQRKVLRPLRTQTGGTIMAGKLAVERGWAINVGGGFHHCSSDRGGGFCAYADITLAIKFLFERVEGISRATIIDLDAHQGNGHERDFMDDKRVYIMDVYNRHIYPGDRFAKQAIRRKVELEWGTEDDEYLDKVERNIKKSLQEHLPDVVVYNAGTDILEGDRLGGLSISPAGIVKRDELVFRMVRGRRVPILMVTSGGYQKRTARIIADSILNLFGLGLIGPESPSVSAQNSDTPLLPPAVP

SEQ ID NO: 11794 - protein, 248 aa, Homo sapiens
GQGGQEAAQPSLGEAKGCLLSESACSLCPRVMTTPNKGNKALKVKREPGENGTSLTDEELVTMSVRELNQHLRGLFKEEFVQLKQRRRTLKNRGYAASYRVKRVTQKGELEKQKAELQQEVEKLASKNASIKLELDALRSKYEAMQTFARTVARSSVAPARGPLAAGLGPLVPGKVAATSVITIVKSKTPRPIVGTRVCPGRILCGATRHMANLAALSLCFLLFSFLPLFPTLLSSLQSTTCTPGAPG

SEQ ID NO: 11795 - protein, 299 aa, Homo sapiens
GASLCQWLNAHCLARHPPAPGWRSPSSLWTGSLASTTYCRLCPSSTGFFSNVAPSAEGHQLFLCNVERSVSHFDAKLLSKYVPVANRYEGTEDDYGDDPSTNSFEKEKQDYVYCLESSLQTYNPDYVLMVEDDAVPEEQIFPVLEHLLRARFSEPHLRDALYLKLYHPERLQHYINPEPMRILEWVGVGMLLGPLLTWIYMRFASRPGVSWPGMLFFSLYSMGLAELVGRHYFLELGRVSPSLYSVVPAPQCCTPAMLFPAPAARRTLTYLSQVYCHKGFGKDMALYSLVEGPRERGPM

SEQ ID NO: 11796 - protein, 112 aa, Homo sapiens
GLSGRERGNQAALTSEEWALAQDFNRPEAHRDQSTSKFSCPGPRVEPTGVPGCGSTHMPHCQPRQEPSWPGSGSACSPARPSPSPDASWHCTLTLHKHLYADGLRDPASLVC

SEQ ID NO: 11797 - protein, 31 aa, Homo sapiens
TGEPLLGQCGKKRWGWRLHTESPLAHCLVEL

SEQ ID NO: 11798 - protein, 75 aa, Homo sapiens
THKAPESSPNSFPPPRGTLEERWGRPPQEWVDRETNMDGTDVGGEGREKGSPGTWGRGIGEKGWGCLPHCPHQRF

SEQ ID NO: 11799 - protein, 67 aa, Homo sapiens
EILRNTWFPSSLGWVFNGSEMHIDEHTHSRAHTHHTHTQTRSHTLPSVNIFLPKGNGSSFLRTFLID

SEQ ID NO: 11800 - protein, 204 aa, Homo sapiens
  DOMAIN (10)..(80): RNA recognition motif. domain identified by PFam, accession name rrm, E-value=2.9e-06, PFam score of 34.3
TAMSSEEGKLFVGGLNFNTDEQALEDHHFSSFGPISEVVVVKDRGTSSGPGGFGFITFTNPEACFKLPMKKPMNRRSLLEWSVRSRCWIMQAKSASGEPEGGGLLGAHWGLGSQLTFKKVVGGPGLIGELSFAMRAMNGESLDGRQIRVDHAGKSARGTRGGGFGAHGRGRSYSRGGGDQGYGSGRYYDSRPRGYRYRYGRSRD

SEQ ID NO: 11801 - protein, 62 aa, Homo sapiens
FFFFCHLSPRLDCSGAIMSYCSLKLLGSSGPPASASQVAGTTGMCHHPQPKHPYFLLEWFTL

SEQ ID NO: 11802 - protein, 62 aa, Homo sapiens
  DOMAIN (28)..(42): VERTEBRATE METALLOTHIONEIN SIGNATURE domain identified by eMATRIX, accession number PR00860B, p-value=1.900e-18, raw score of 7.04
  DOMAIN (4)..(62): Metallothionein domain identified by PFam, accession name metalthio, E-value=6e-18, PFam score of 73.1
AAGLDGKHWIGGSCACAGSCKCKKCKCTSCKKSCCSCCPLGCAKCAQGCICKGASEKCSCCA

SEQ ID NO: 11803 - protein, 68 aa, Homo sapiens
  DOMAIN (34)..(48): VERTEBRATE METALLOTHIONEIN SIGNATURE domain identified by eMATRIX, accession number PR00860B, p-value=1.900e-18, raw score of 7.04
  DOMAIN (8)..(68): Metallothionein domain identified by PFam, accession name metalthio, E-value=2e-24, PFam score of 94.6
ATSPRLAMDPNCSCEAGGSCACAGSCKCKKCKCTSCKKSCCSCCPLGCAKCAQGCICKGASEKCSCCA

SEQ ID NO: 11804 - protein, 130 aa, Homo sapiens
  misc_feature (1)...(130): Xaa = X or * as defined in Table 2
MLAKRVQGCYKKKKKKNPRFNIGCLYLHLKSTAVPGIQAQQLHLSDVPLQMXAPGQSYCTAHRAAGAAARLCQDGAICDSIAICQEPAQAPGANRRAGAVGSPFRGQGEARSSRSKRKTRSGTDEKRPEL

SEQ ID NO: 11805 - protein, 86 aa, Homo sapiens
DLGWGFFVKGSTKKMGPLKKTGYQKKFWSFPGIKGPKKPKAFEAKNLGPRGPAHYSHPFGGLNQRIGLTRGVPGPPGPHNEALFFF

SEQ ID NO: 11806 - protein, 12 aa, Homo sapiens
LALPRPQHFQKV

SEQ ID NO: 11807 - protein, 89 aa, Homo sapiens
  DOMAIN (14)..(42): !!!! PROTEIN ALU SUBFAMILY WARNING ENTRY NUCLEAR PHOSPHO domain identified by eMATRIX, accession number PD02454B, p-value= 8.200e-18, raw score of 11.61
  misc_feature (1)...(89): Xaa = X or * as defined in Table 2
SQHFGRPRQVDHLRLGVGDQLDQHGETPSLLKIQNWPGVVAHACNPSYSGGXGRRIRLTLGGGGCGELRSCHCTPALATRAKLRLKKKK

SEQ ID NO: 11808 - protein, 41 aa, Homo sapiens
MGYNFETGCLMDGSGFLSVGNKRFGEHGIPRSRMGPVTDSK

SEQ ID NO: 11809 - protein, 27 aa, Homo sapiens
LLKLRRSLFGFVKVLRKYMIYIYTKTI

SEQ ID NO: 11810 - protein, 63 aa, Homo sapiens
  misc_feature (1)...(63): Xaa = X or * as defined in Table 2
TFCLVFFQFSYNFQLVPVFNTALVCXRHXLIAFLNLRIIXFXYKYISYIFVKLXQNQISKPWF

SEQ ID NO: 11811 - protein, 85 aa, Homo sapiens
  DOMAIN (41)..(52): Aminoacyl-transfer RNA synthetases class-I proteins domain identified by eMATRIX, accession number BL00178B, p-value=2.286e- 09, raw score of 7.11
  DOMAIN (5)..(57): tRNA synthetases class I (C) domain identified by PFam, accession name tRNA-synt_1e, E-value=1.4e-21, PFam score of 78.3
GGIDLAFPHHENEIAQCEVFHQCEQWGNYFLHSGHLHAKGKEEKMSKSLKNYITIKPSTTVTAPCSKLSSCSWGWALSWRTHVPT

SEQ ID NO: 11812 - protein, 36 aa, Homo sapiens
KPYQWFTSYCNVFISFFFLSLNLAKSYCKEIFGCHK

SEQ ID NO: 11813 - protein, 88 aa, Homo sapiens
GHVSQELYLWELICTILPFFFFFFETELCSVTRLECSGAISAHYNLCLPGSSDSPASASQTSGITGVTTAPSHHFISLKSGPSIKPIL

SEQ ID NO: 11814 - protein, 218 aa, Homo sapiens
  DOMAIN (151)..(203): Ubiquitin domain proteins domain identified by eMATRIX, accession number BL00299, p-value=3.186e-12, raw score of 28.84
  DOMAIN (137)..(188): Ubiquitin family domain identified by PFam, accession name ubiquitin, E-value=2.9e-07, PFam score of 27.0
SSAVEFGVALGRNQPLKKEKPKWKSDYPMTDGQLRSKRDEFWDTAPAFEGRKEIWDALKAAAHAFESNDHELAQAIIDGANITLPHGALTECYDELGNRYQLPVYCLAPPINMIEEKSDIETLDIPEPPPNSGYECQLRLRLSTGKDLKLVVRSTDTVFHMKRRLHAAEGVEPGSQRWFFSGRPLTDKMKFEELKIPKDYVVQVIVSQPVQNPTPVEN

SEQ ID NO: 11815 - protein, 64 aa, Homo sapiens
RPDSHCLFSPPQLTHASPSLPTEDRGPPQPETFPEDMGNTEAETAHPPRSCPPHCREPAPRAAR

SEQ ID NO: 11816 - protein, 79 aa, Homo sapiens
CQRSKNSGEAASWDQRRASSRQPGDRTLTHASPSLPTEDRGPPQPETFPEDMGNTEAETAHPPRSCPPHCREPAPRAAR

SEQ ID NO: 11817 - protein, 241 aa, Homo sapiens
  DOMAIN (147)..(182): Troponin domain identified by eMATRIX, accession number PF00992A, p-value=3.842e-09, raw score of 16.67
YNSARPRPPAPPAPQQNSAQRSRAPGSERPAAQSGGETDRSADRDSGRDSGETRVCERAGPSGPRSGSAAQRAPSANMSVDPLSSKALKIKRELSENTPHLSDEALMGLSVRELNRHLRGLSAEEVTRLKQRRRTLKNRGYAASCRVKRVCQKEELQKQKSELEREVDKLARENAAMRLELDALRGKCEALQGFARSVAAARGPATLVAPASVITIVKSTPGSGSGPAHGPDPAHGPASCS

SEQ ID NO: 11818 - protein, 38 aa, Homo sapiens
KVHWCRAWWHVPVFPASGKAEAGRFLEPRSLRQAWTTQ

SEQ ID NO: 11819 - protein, 85 aa, Homo sapiens
  DOMAIN (9)..(37): !!!! PROTEIN ALU SUBFAMILY WARNING ENTRY NUCLEAR PHOSPHO domain identified by eMATRIX, accession number PD02454B, p-value= 1.277e-18, raw score of 11.61
  misc_feature (1)...(85): Xaa = X or * as defined in Table 2
GGQGRWITRSAVQDPHGQDGEKPSLLKIQKLARHGGRRLXSQLLGRLRQENCLNLGGGGCSEPRSHPCTPAWVTEQDSVSKKKKK

SEQ ID NO: 11820 - protein, 51 aa, Homo sapiens
PRPAGFSTFQETAARLPCMVWWTSWCGSGRRSGSLRWPCPRPRGTPGGSSS

SEQ ID NO: 11821 - protein, 222 aa, Homo sapiens
  DOMAIN (87)..(123): Granins proteins domain identified by eMATRIX, accession number BL00422E, p-value=6.077e-09, raw score of 26.86
  misc_feature (1)...(222): Xaa = X or * as defined in Table 2
MALRKNEVFEGWDGRKGVSHGEGCFSKGSNIGAYLGKSQEQFEGNIRGNRQIIVNNESKLKISEEDLTPRMRQRSNTLPKSFGSQLEKEDEKKQELVDKAIKPSVEATLESIQRKLQEKRAESSRPEDIKDMTKDQIANEKVALQKALLYYESIHGRPVTKNERQVMKPLYDRYRLVKQILSRANTIPIIVSRIPSRGWYNTFPXCPQGGCFPLASPGASSE

SEQ ID NO: 11822 - protein, 79 aa, Homo sapiens
AVSHKPFGVLKWPNNHQSLNEPVSDPPLVPPSPCRLLPPPLTPPTSPQILFSSSAAATVTAVSAPVFLLQSFPPQYLQI

SEQ ID NO: 11823 - protein, 118 aa, Homo sapiens
VPPAGGRGVPPCVRGQHSVQPDPHLQGPWGLLLQHPGREYHQQDTSVPQDPGVALQNPAGCLCFPMCYTYHCDVGLHHVHDPAECHSAKGHGGEPGATLWGQVLLPDVLWAFLAGDSI

SEQ ID NO: 11824 - protein, 96 aa, Homo sapiens
PCAQRQAKYSYRSKYRWPDNSTALDPVFFPIDGPVQVLRLLPLPHPTPPHVRIIQGPLWPSGPIPPQLGRSRLSWGEKGTMGLGRWSGPCREWSGP

SEQ ID NO: 11825 - protein, 31 aa, Homo sapiens
RIVICWAQWLTAVIPPLWEAKAGGLPELRSS

SEQ ID NO: 11826 - protein, 79 aa, Homo sapiens
GSQGSRRCSGRPGMHLWLSVPTDVTASASLPQSPPAAKPGPHLGVISCLTSSRHLGFFGLISGSLALTLALTQLIPASP

SEQ ID NO: 11827 - protein, 126 aa, Homo sapiens
  DOMAIN (109)..(120): Aminoacyl-transfer RNA synthetases class-I proteins domain identified by eMATRIX, accession number BL00178B, p-value=2.286e- 09, raw score of 7.11
  DOMAIN (102)..(125): tRNA synthetases class I (C) domain identified by PFam, accession name tRNA-synt_1e, E-value=0.0041, PFam score of 13.3
NTAVSTTVAGSCLASESAGAPLPSALSVGLGVPAPWNKGRSCLPGRPSTGEDLGADFIPNPTLGLYIGNVQVPIRFLGSHVSLRPESLLTQLRLNAFVFVSGHLHAKGKEEKMSKSLKNYITIKKK

SEQ ID NO: 11828 - protein, 25 aa, Homo sapiens
RKLLHIYIYIYIYIYDLIYWQFYLM

SEQ ID NO: 11829 - protein, 535 aa, Homo sapiens
  DOMAIN (146)..(194): T-box domain proteins domain identified by eMATRIX, accession number BL01283A, p-value=3.829e-37, raw score of 24.15
  DOMAIN (138)..(327): T-box domain identified by PFam, accession name T-box, E- value=6.4e-108, PFam score of 371.9
MGIVEPGCGDMLTGTEPMPGSDEGRAPGADPQHRYFYPEPGAQDADERRGGGSLGSPYPGGALVPAPPSRFLGAYAYPPRPQAAGFPGAGESFPPPADAEGYQPGEGYAAPDPRAGLYPGPREDYALPAGLEVSGKLRVALNNHLLWSKFNQHQTEMIITKQGRRMFPFLSFTVAGLEPTSHYRMFVDVVLVDQHHWRYQSGKWVQCGKAEGSMPGNRLYVHPDSPNTGAHWMRQEVSFGKLKLTNNKGASNNVTQMIVLQSLHKYQPRLHIVEVNDGEPEAACNASNTHIFTFQETQFIAVTAYQNAEITQLKIDNNPFAKGFRENFESMYTSVDTSIPSPPGPNCQFLGGDHYSPLLPNQYPVPSRFYPDLPGQAKDVVPQAYWLGAPRDHSYEAEFRAVSMKPAFLPSAPGPTMSYYRGQEVLAPGAGWPVAPQYPPKMGPASWFRPMRTLPMEPGPGGSEGRGPEDQGPPLVWTEIAPIRPESSDSGLGEGDSKRRRVSPYPSSGDSSSPAGAPSPFDKEAEGQFYNYFPN

SEQ ID NO: 11830 - protein, 272 aa, Homo sapiens
  DOMAIN (21)..(32): Oxysterol-binding protein family proteins domain identified by eMATRIX, accession number BL01013B, p-value=3.017e-11, raw score of 11.33
VYIAAFAVSAYSSTYHRAGCKPFNPVLGETYECERPDRGFRFISEQAVTAMNWVSWKVKICVLEALQAASGSPSFTSTICSRGCMYTSVDTSIPSPPGPNCQFLGGDHYSPLLPNQYPVPSRFYPDLPGQAKDVVPQAYWLGAPRDHSYEAEFRAVSMKPAFLPSAPGPTMSYYRGQEVLAPGAGWPVAPQYPPKMGPASWFRPMRTLPMEPGPGGSEGRGPEDQGPPLVWTEIAPIRPESSDSGLGEGDSKRRRVSPYPSRGDSSSPAGAD

SEQ ID NO: 11831 - protein, 327 aa, Homo sapiens
  DOMAIN (68)..(101): T-box domain proteins domain identified by eMATRIX, accession number BL01283D, p-value=1.191e-27, raw score of 11.70
  DOMAIN (32)..(102): T-box domain identified by PFam, accession name T-box, E- value=6.4e-33, PFam score of 117.1
  misc_feature (1)...(327): Xaa = X or * as defined in Table 2
KVTLMRWLYKGXNSGPMSVTEEMDLAIEASEMIVLQSLHKYQPRLHIVEVNDGEPEAACNASNTHIFTFQETQFIAGTAYLNAEITQLKIDNNPFAKGFRENFESMYTSVDTSIPSPPGPNCQFLGGDHYSPLLPNQYPVPSRFYPDLPGQAKDVGGSSRVNREVSKDFADFGTTIKQDFRLLGQTSVDRLLQLSQGQAVKGNQLLPVSLVKRKTTLAPNTQTASPRALADSLMQLARQVSRLESGQDFADFGTTIKQDFRLLGQTSVDRLLQLSQGQAVKGNQLLPVSLVKRKTTLAPNTQTASPRALADSLMQLARQVSRLESGQ

SEQ ID NO: 11832 - protein, 703 aa, Homo sapiens
  DOMAIN (462)..(495): T-box domain proteins domain identified by eMATRIX, accession number BL01283D, p-value=4.484e-34, raw score of 11.70
  DOMAIN (199)..(495): T-box domain identified by PFam, accession name T-box, E- value=4.1e-93, PFam score of 322.8
MQEIHGALDSPGDTDSDMKMQRQTQTRYRDKASSEAHSPRDPLARGGAGPRRLREGASPPRMGIVEPGCGDMLTGTEPMPGSDEGRAPGADPQHRYFYPEPGAQDADERRGGGSLGSPYPGGALVPAPPSRFLGAYAYPPRPQAAGFPGAGESFPPPADAEGYQPGEGYAAPDPRAGLYPGPREDYALPAGLEVSGKLRVALNNHLLWSKFNQHQTEMIITKQGRSALVVVVVVVAVVVKRKAKPLELVMELVLVEVVVVVTVLLVVVVTVKVVAVDGGARAGAGGDRGYRDGGGGSCSDGGCDGGDGWRMFPFLSFTVAGLEPTSHYRMFVDVVLVDQHHWRYQSGKWVQCGKAEGSMPGKALHPPGFLSPGLECKRGELSTGTRLYVHPDSPNTGAHWMRQEVSFGKLKLTNNKGASNNVTQMIVLQSLHKYQPRLHIVEVNDGEPEAACNASNTHIFTFQETQFIAVTAYQNAEITQLKIDNNPFAKGFRENFESMYTSVDTSIPSPPGPNCQFLGGDHYSPLLPNQYPVPSRFYPDLPGQAKDVVPQAYWLGAPRDHSYEAEFRAVSMKPAFLPSAPGPTMSYYRGQEVLAPGAGWPVAPQYPPKMGPASWFRPMRTLPMEPGPGGSEGRGPEDQGPPLVWTEIAPIRPESSDSGLGEGDSKRRRVSPYPSSGDSSSPAGAPSPFDKEAEGQFYNYFPN

SEQ ID NO: 11833 - protein, 124 aa, Homo sapiens
RKSAGPPGRTEGSRQVPGRRCPAALQAPVIPLVPALAMPYLPSEPEPIFSYPHSMQGAPSPRNTHRQTHTHGHSPQLPGFPMCSGKGPAKPEQPPLNLDAHLSSFQLPSEDQGAQIRRKGEGLR

SEQ ID NO: 11834 - protein, 10 aa, Homo sapiens
PFPMHQSHFP

SEQ ID NO: 11835 - protein, 38 aa, Homo sapiens
LKFWDETFLYFKTTSPCKHHTHMACMYAHAHTHTHTPQ

SEQ ID NO: 11836 - protein, 42 aa, Homo sapiens
ARYNPPKKKMLQRKCLFPRLVLNSWPQAILLPWPSKVLGLQA

SEQ ID NO: 11837 - protein, 412 aa, Homo sapiens
  DOMAIN (269)..(291): CYSTEINYL-TRNA SYNTHETASE SIGNATURE domain identified by eMATRIX, accession number PR00983D, p-value=3.647e-23, raw score of 14.16
  DOMAIN (62)..(364): tRNA synthetases class I (C) domain identified by PFam, accession name tRNA-synt_1e, E-value=1.9e-116, PFam score of 400.3
GLRAAQAWAPRCSRPRWALGGLGGTGLRSLSASGGRGRAWLQPTGRETGVQVYNSLTGRKEPLIVAHAEAASWYSCGPTVYDHAHLGHACSYVRFDIIRRILTKVFGCSIVMVMGITDVDDKIIKRANEMNISPASLASLYEEDFKQDMAALKVLPPTVYLRVTENIPHIISFIERIIARGNAYSTAKGNVYFDLKSTGDKYGKLVGEVPGPVGEPADSDKRHASDFALWKAAKPQEVFWASPWGPGRPGWHIECSCLASNGIWKVNLDIHSGGIDLAFPHHENEIAQCEVFHQCEQWGNYFLHSGHLHAKGKEEKMSKSLKNYITIKDFLKTFSPDVFRFFCLRSSYRSAIDYSDSAMLQVSSCSWGLGSFLEDARALHGRGAAGLRLRQGSDAVGEALQHQEGREGGLGR

SEQ ID NO: 11838 - protein, 45 aa, Homo sapiens
  DOMAIN (12)..(19): PAPAIN CYSTEINE PROTEASE (C1) FAMILY SIGNATURE domain identified by eMATRIX, accession number PR00705C, p-value=9.250e- 10, raw score of 11.87
CCWCCWCCWCWCWCCCCCCHRRRCLIHLEFVVAGLAKPAQENKNK

SEQ ID NO: 11839 - protein, 63 aa, Homo sapiens
PVLCRGNSGSLSRKFPPKPQKPADKDHPRTCVYLENRSPGKSESKKIPAYAETNPPSQLSPWS

SEQ ID NO: 11840 - protein, 37 aa, Homo sapiens
CQQFLLLCQGSQAEPTEHGPSRVFPEPPPPYWNPSSV

SEQ ID NO: 11841 - protein, 28 aa, Homo sapiens
QKNQEPAGHQPGPIPPCVLGLGNELIRS

SEQ ID NO: 11842 - protein, 442 aa, Homo sapiens
  DOMAIN (369)..(395): G-protein coupled receptors family 2 proteins domain identified by eMATRIX, accession number BL00649G, p-value=9.571e- 27, raw score of 13.52
  DOMAIN (168)..(386): 7 transmembrane receptor (Secretin family) domain identified by PFam, accession name 7tm_2, E-value=2.4e-76, PFam score of 267.0
MVGPRSQPDTANRAPTGLTQLIALQSPSAHRPDTAHHAPPTDLTQPMALHPQPDTAMALCPQAPKRRTHPVLNECTVNDRVNDPPNIQVPRPPGLLSAPPPPPILHLTLLQASPDMRLYGLVFLFLSGGTRQRCSPELLVRAAGMCAPSTCTRVLFTQRDRGQSPGPLQGPCHPYLAPHMTSCRLFWFFAGRQTTAGVPVLKQVGCKLSLVFLQYCIMANFFWLLVEGLYLHTLLVAMLPPRRCFLAYLLIGWGLPTVCIGAWTAARLYLEDTGCWDTNDHSVPWWVIRIPILISIIVNFVLFISIIRILLQKLTSPDVGGNDQSQYKRLAKSTLLLIPLFGVHYMVFAVFPISISSKYQILFELCLGSFQGLVVAVLYCFLNSEVQCELKRKWRSRCPTPSASRDYRVCGSSFSRNGSEGALQFHRGSRAQSFLQTETSVI

SEQ ID NO: 11843 - protein, 500 aa, Homo sapiens
  DOMAIN (195)..(241): G-protein coupled receptors family 2 proteins domain identified by eMATRIX, accession number BL00649B, p-value=9.625e- 38, raw score of 20.68
  DOMAIN (185)..(444): 7 transmembrane receptor (Secretin family) domain identified by PFam, accession name 7tm_2, E-value=8.8e-131, PFam score of 447.9
CIERAPAAGTEGAAPALGALGYSCGARGLRALAPGPCWRRRNRGDLGRRRRALGGPRHAELGMRTLLPPALLTCWLLAPVNSIHPECRFHLEIQEEETKCAELLRSQTEKHKACSGVWDNITCWRPANVGETVTVPCPKVFSNFYSKAGNISKNCTSDGWSETFPDFVDACGYSDPEDESKITFYILVKAIYTLGYSVSLMSLATGSIILCLFRKLHCTRNYIHLNLFLSFILRAISVLVKDDVLYSSSGTLHCPDQPSSWVGCKLSLVFLQYCIMANFFWLLVEGLYLHTLLVAMLPPRRCFLAYLLIGWGLPTVCIGAWTAARLYLEDTGCWDTNDHSVPWWVIRIPILISIIVNFVLFISIIRILLQKLTSPDVGGNDQSQYKRLAKSTLLLIPLFGVHYMVFAVFPISISSKYQILFELCLGSFQGLVVAVLYCFLNSEVQCELKRKWRSRCPTPSASRDYRVCGSSFSRNGSEGALQFHRGSRAQSFLQTETSVI

SEQ ID NO: 11844 - protein, 705 aa, Homo sapiens
  misc_feature (1)...(705): Xaa = X or * as defined in Table 2
XHGSVVVWDLREDSRLHYSVTLSDGFWTFRTATFSTDGILTSVNHRSPLQAVEPISTSVHKKQSFVLSPFSTQEEMSGLSFHIASLDESGVLNVWVVVELPKADIAGSISDLGLMPGGRVKLWDSSTDSHAVTGLQWSPTRPAVFLVQDDTSNIYIWDLLQSDLGPVAKQQVSPNRLVAMAAVGEPEKAGGSFLALVLARASGSIDIQHLKRRWAAPEVHSCVERKWSGHTASRVHTHSPSLLLFCNPLDDWSRSFETEAPKHWVFFEPYRNVKFVKKETSKKANDLPLSLTPREELARCLWAPPSPSVEGPMTAEAVPWNESSHSSKGRREGPEPHRRRSSAEQEVQAARLQGKERKARGEHGRSIKGRENGAKQDKPRQAPPTVSVFRQPSPPSRESAHSSGTRFQLGCSHTELTGGHLASLCDYLLQTPRPGVPEHRASPGSKCTRHSHSHTLGRGEGVVCTCPSATDTPQVVERESNPLDEVRRGHAGEHRLLSQSLSTVGAESISSKSTGWAPLNAPVRTFLGESLGSAFSSASIALRTSVKRRHKWARPHTNGARQPPGGKGTPPGGKEHPYEIKAPPPCVSRWLSSPPPGTPSCTTVRRSWLPSALKHCCVLRREMAVCHRLSKCPANAIVKHPCEGKSPPYRALWHRSGVWTVAGTQRSPNIRAHRDQTLRNNYTILIPNGNWRHGAYAGVSSFSRX

SEQ ID NO: 11845 - protein, 1091 aa, Homo sapiens
  DOMAIN (815)..(839): SECRETIN-LIKE GPCR SUPERFAMILY SIGNATURE domain identified by eMATRIX, accession number PR00249C, p-value=1.346e-22, raw score of 17.08
  DOMAIN (713)..(975): 7 transmembrane receptor (Secretin family) domain identified by PFam, accession name 7tm_2, E-value=2.4e-05, PFam score of -42.7
SKINEYDMYIRNFGKKNTKQAYVQCNEDNVERDIQTEDIETREVWTQHPGESTVVSGGSEQRDTSDAVVMPKIDTPRLCSFLRAACQVMAVLLEEDRLAAEPSWNLRAQDRALYFSDSSSQLNTSLPFLQNRKVSSLHTSRVQRQMVVSVHDLPEKSFVPLLDSKYVLCVWDIWQPSGPQKVLICESQVTCCCLSPLKAFLLFAGTAHGSVVVWDLREDSRLHYSVTLSDGFWTFRTATFSTEMSGLSFHIASLDESGVLNVWEEDGLPRAACFLRKRTASRALPASSGRGRPPARCRLPQEEDGLPRAAGFLRKRTASRALPASSGRGRPPARCRLPQEEDGLPRAAGFLRKRTASRALPAFSGRGRPPARCRLPQEEDGLPRAACFLRKRTASRLLPVSSGRGRPPARCRFPQEEDGLPRAACFLRKRTASRALPVSSGRGRPPARCRLPQEEDGLPRAAGFHRKRTASRALPASSGRGRPPARCRLPQEEDGLPRAAGFLRKRTASRALLALSGLLRFSFECHHTHTCDSFPPQRETSEWTSSLSVRAKCTQFCSVTTSTTGQCEVFELVLTENCQLPKDLGALLPTPGASIRVRSVVTLQSAHFSYYMRDSSRTCSERSFTMSDTLYSLRQETFSLDTISAQHYYSPAPDEVCQRPRGGYTAQIVDRVAMQPAYLSHKGNEFWGTTQTLNVKFLPSDPNHFIIGTDMWDSSTDSHAVTGLQWSPTRPAVFLVQDDTSNIYIWDLLQSDLGPVAKQQVSPNRQTEKQNKKKRMFGRKEFRYKQGFNTFRVTLQSLTMTYPLHVVEKQVGCKLSLVFLQYCIMANFFWLLVEGLYLHTLLVAMLPPRRCFLAYLLIGWGLPTVCIGAWTAARLYLEDTGAPLSVVWRVTTAPKTVLDARNAGHLLFVFISRDTPGHLKFSFYIQVERPGHLYDPAPRVHTVRGHAASALKHCSSATRDAVCHRLSKCPANAIVKHPCEVKSPPYRALWHRSGVWTVAGTQRSPNISAHRDQVCGQSQARSGAAAAGPPRSGRWVPFQGDLTGAHCSSCFSPRELSVPLGTQHSLCTVLHMDLCGHHLLAFIPSSSSLPC

SEQ ID NO: 11846 - protein, 61 aa, Homo sapiens
SQHFGRPRWADDLRSGVLPASASQSVGITGMSHCTQPLFLMLITYFYLLMHQLGQSVQHEQ

SEQ ID NO: 11847 - protein, 106 aa, Homo sapiens
AETEPKQEHLCPRSSWLEGARARPHRPLGTRRLAAAVFTWAGVHPVTPTWIMGAGNIERVVSTPKGRLKMPRLGLETSLPTKRRWLSFPRALNSQQQGFTPQSLYA

SEQ ID NO: 11848 - protein, 140 aa, Homo sapiens
NVLVICQRNSNSFKKLFKVRDDGEQTQQDFSALQASSQGRPELVHSRGVQGPGWHQPPWVCQNPLAKAAFTALLVLESLREEERTVTAEGAPLSPGGPHTSPSPGRDAGGSNLGTFSRSYSQRLEFLSSRKLCNINCKLS

SEQ ID NO: 11849 - protein, 73 aa, Homo sapiens
GTYRLGRLAHPLPGSSAPVPCPSYRSSPPPPHPEIARDTRRPPASPGAGRGTPGVEEGPIYMLFSLPTRAGLA

SEQ ID NO: 11850 - protein, 52 aa, Homo sapiens
  DOMAIN (5)..(28): LACY PROTON/SUGAR SYMPORTER SIGNATURE domain identified by eMATRIX, accession number PR00174A, p-value=8.809e-11, raw score of 8.67
GSLVVAMLSFFLFFLSFSFFLSFFAFFSFFLFFFFFANNLQAYVKYSKNTGS

SEQ ID NO: 11851 - protein, 86 aa, Homo sapiens
FWLRGLMACGRFAQRPANHQARPRRLGSAPKPSPSAWPAMPCTLAESGVAQPGVGFGPARWSALPRSPGGWGRFGEWPVAKTKGIW

SEQ ID NO: 11852 - protein, 67 aa, Homo sapiens
FIVESQLFLVFVVFETLSWSIRAGVFTFLWSRWISYVCLFAYFVYEFCNLNWQVSYIYVFTINSIKR

SEQ ID NO: 11853 - protein, 103 aa, Homo sapiens
PWLGLLIFSLPLPFLSLSSRSHLPGLKYFVGIAYYIILADEPQDNVYTHTHTYTHTKSQLLKSGLGIRLLCPVKNSCTGSHCDLSSYRLIPVELDSNFLFDSN

SEQ ID NO: 11854 - protein, 63 aa, Homo sapiens
  DOMAIN (3)..(38): Matrix protein (MA) p15. domain identified by eMATRIX, accession number PF01140D, p-value=1.675e-10, raw score of 15.54
YLRERREKERGREREKERKKERKKERKKERKKKKRRKKERKRQEEEERDRKNKKTAILRMRIN

SEQ ID NO: 11855 - protein, 405 aa, Homo sapiens
  DOMAIN (42)..(339): Eukaryotic protein kinase domain identified by PFam, accession name pkinase, E-value=2.9e-21, PFam score of 80.6
MTLKEHAAFKHLFNKAHLAPPLIHLTLSGHSTCFREHWVGDIVHRDLKLENIMVKSSLIDDNNEINLNIKVTDFGLAVKKQSRSEAMLQATCGTPIYMDRGWNSLEGSEQDRKMWDSLELPRDLLNVFEQNADNDMDDEIQAEVLSDGDEELLGNWSKGDSCYVLLKQLAAFCPCLRDLWNFKLERDDLGYLVEEISKQQSIQEATWVLLKAFSFIREAEHKNLENLQPDNAIEKKIPFSEEKFKLAAEICISNQEANVNPQDNEKNVSRACQRSSQQPLPLPRVLGGKSGFVGWAQDSHAEIYTFGRILGKGSFGIVIEATDKETETKWAIKKVNKEKSTAYEKQFPATSKDNFDMCSSSFTSSKLLPAEIKGEMEKTPVTPSQGTATKYPAKSGALSRTKKKL

SEQ ID NO: 11856 - protein, 139 aa, Homo sapiens
  DOMAIN (51)..(96): Cytosolic fatty-acid binding proteins domain identified by eMATRIX, accession number BL00214B, p-value=8.200e-16, raw score of 26.51
  DOMAIN (9)..(139): Lipocalin / cytosolic fatty-acid binding pr domain identified by PFam, accession name lipocalin, E-value=8.9e-18, PFam score of 65.3
PRSPTMPADLSGTWTLLSSDNFEGYMLALGIDFATRKIAKLLKPQKVIEQNGDSFTIHTNSSLRNYFVKFKVGEKFDEDNRGLDNRKCKSLGIWDNDRLTCIQKGEKKNRGWTHWIEGDKLHLEMFCEGQVCKQTFQRA

SEQ ID NO: 11857 - protein, 108 aa, Homo sapiens
  misc_feature (1)...(108): Xaa = X or * as defined in Table 2
AATLGHCPSSIQCWRSAGSCPRASSSGPQASPMAWVXSTDLRXMSWATSLQGWCPQWPPTPSCSQSSWAALHHRCGWVCHCHLTGEDLRPEARLPGGQQPGAGGPGPQ

SEQ ID NO: 11858 - protein, 84 aa, Homo sapiens
  misc_feature (1)...(84): Xaa = X or * as defined in Table 2
DGRCNSQWSRRLQGPRWVHTEGPGPASARLPQPHPGPGCPLLCGHCVPQEPEEYFPXLPQPHPGPGCPLLCGHCVPQEPEEYFP

SEQ ID NO: 11859 - protein, 88 aa, Homo sapiens
PHPEPKGPKLRAPLSPPDFPPGSRLAGSPGAPPPPPHPEDRLHQGSSHPHPIPRLLERSLAQGGAAPLGPPRMPHGAAPQGCSPSTPT

SEQ ID NO: 11860 - protein, 1364 aa, Homo sapiens
  DOMAIN (136)..(155): TYPE III EGF-LIKE SIGNATURE domain identified by eMATRIX, accession number PR00011B, p-value=4.981e-15, raw score of 13.08
  DOMAIN (588)..(830): 7 transmembrane receptor (Secretin family) domain identified by PFam, accession name 7tm_2, E-value=1.8e-90, PFam score of 314.0
PCPPHADCRDLWQTFSCTCQPGYYGPGCVDACLLNPCQNQGSCRHLPGAPHGYTCDCVGGYFGHHCEHRMDQQCPRGWWGSPTCGPCNCDVHKGFDPNCNKTNGQCHCKEFHYRPRGSDSCLPCDCYPVGSTSRSCAPHSGQCPCRPGALGRQCNSCDSPFAEVTASGCRVLYDACPKSLRSGVWWPQTKFGVLATVPCPRGALGLRGAGAAVRLCDEAQGWLEPDLFNCTSPAFRELSLLLDGLELNKTALDTMEAKKLAQRLREVTGHTDHYFSQDVRVTARLLAHLLAFESHQQGFGLTATQDAHFNENLLWAGSALLAPETGDLWAALGQRAPGGSPGSAGLVRHLEEYAATLARNMELTYLNPMGLVTPNIMLSIDRMEHPSSPRGARRYPRYHSNLFRGQDAWDPHTHVLLPSQSPRPSPSEVLPTSSSIENSTTSSVVPPPAPPEPEPGISIIILLVYRTLGGLLPAQFQAERRGARLPQNPVMNSPVVSVAVFHGRNFLRGILESPISLEFRLLQTANRSKAICVQWDPPGLAEQHGVWTARDCELVHRNGSHARCRCSRTGTFGVLMDASPRERLEGDLELLAVFTHVVVAVSVAALVLTAAILLSLRSLKSNVRGIHANVAAALGVAELLFLLGIHRTHNQLVCTAVAILLHYFFLSTFAWLFVQGLHLYRMQVEPRNVDRGAMRFYHALGWGVPAVLLGLAVGLDPEGYGNPDFCWISVHEPLIWSFAGPVVLVIVMNGTMFLLAARTSCSTGQREAKKTSALTLRSSFLLLLLVSASWLFGLLAVNHSILAFHYLHAGLCGLQGLAVLLLFCVLNADARAAWMPACLGRKAAPEEARPAPGLGPGAYNNTALFEESGLIRITLGASTVSSVSSARSGRTQDQDSQRGRSYLRDNVLVRHGSAADHTDHSLQAHAGPTDLDVAMFHRDAGADSDSDSDLSLEEERSLSIPSSESEDNGRTRGRFQRPLCRAAQSERLLTHPKDVDGNDLLSYWPALGECEAAPCALQTWGSERRLGLDTSKDAANNNQPDPALTSGDETSLGRAQRQRKGILKNRLQYPLVPQTRGAPELSWCRAATLGHRAVPAASYGRIYAGGGTGSLSQPASRYSSREQLDLLLRRQLSRERLEEAPAPVLRPLSRPGSQECMDAAPGRLEPKDRGSTLPRRQPPRDYPGAMAGRFGSRDALDLGAPREWLSTLPPPRRTRDLDPQPPPLPLSPQRQLSRDPLLPSRPLDSLSRSSNSREQLDQVPSRHPSREALGPLPQLLRAREDSVSGPSHGPSTEQLDILSSILASFNSSALSSVQSSSTPLGPHTTATPSATASVLGPSTPRSATSHSISELSPDSEVPRSEGHS

SEQ ID NO: 11861 - protein, 3439 aa, Homo sapiens
  DOMAIN (2117)..(2136): TYPE III EGF-LIKE SIGNATURE domain identified by eMATRIX, accession number PR00011B, p-value=4.981e-15, raw score of 13.08
  DOMAIN (358)..(1294): Cadherin domain identified by PFam, accession name cadherin, E-value=1.9e-208, PFam score of 705.9
ISHSTPSQSYENAHGHQNFRPKSGTRFRTSGQEGGTRDLEGQKKAGRRSWDSALEGGSQEELGGGGHQGWDPGLAATTGPRAHIGGGALALCPESSGVREDGGPGLGVREPIFVGLRGRRQSARNSRGPPEQPNEELGIEHGVQPLGSRERETGQGPGSVLYWRPEVSSCGRTGPLQRGSLSPGALSSGVPGSGNSSPLPSDFLIRHHGPKPVSSQRNAGTGSRKRVGTARCCGELWATGSKGQGERATTSGAERTAPRRNCLPGASGSGPELDSAPRTARTAPASGSAPRESRTAPEPAPKRMRSRGLFRCRFLPQRPGPRPPGLPARPEARKVTSANRARFRRAANRHPQFPQYNYQTLVPENEAAGTAVLRVVAQDPDAGEAGRLVYSLAALMNSRSLELFSIDPQSGLIRTAAALDRESMERHYLRVTAQDHGSPRLSATTMVAVTVADRNDHSPVFEQAQYRETLRENVEEGYPILQLRATDGDAPPNANLRYRFVGPPAARAAAAAAFEIDPRSGLISTSGRVDREHMESYELVVEASDQGQEPGPRSATVRVHITVLDENDNAPQFSEKRYVAQVREDVRPHTVVLRVTATDRDKDANGLVHYNIISGNSRGHFAIDSLTGEIQVVAPLDFEAEREYALRIRAQDAGRPPLSNNTGLASIQVVDINDHIPIFVSTPFQVSVLENAPLGHSVIHIQAVDADHGENARLEYSLTGVAPDTPFVINSATGWVSVSGPLDRESVEHYFFGVEARDHGSPPLSASASVTVTVLDVNDNRPEFTMKEYHLRLNEDAAVGTSVVSVTAVDRDANSAISYQITGGNTRNRFAISTQGGVGLVTLALPLDYKQERYFKLVLTASDRALHDHCYVHINITDANTHRPVFQSAHYSVSVNEDRPMGSTIVVISASDDDVGENARITYLLEDNLPQFRIDADSGAITLQAPLDYEDQVTYTLAITARDNGIPQKADTTYVEVMVNDVNDNAPQFVASHYTGLVSEDAPPFTSVLQISATDRDAHANGRVQYTFQNGEDGDGDFTIEPTSGIVRTVRRLDREAVSVYELTAYAVDRGVPPLRTPVSIQVMVQDVNDNAPVFPAEEFEVRVKENSIVGSVVAQITAVDPDEGPNAHIMYQIVEGNIPELFQMDIFSGELTALIDLDYEARQEYVIVVQATSAPLVSRATVHVRLVDQNDNSPVLNNFQILFNNYVSNRSDTFPSGIIGRIPAYDPDVSDHLFYSFERGNELQLLVVNQTSGELRLSRKLDNNRPLVASMLVTVTDGLHSVTAQCVLRVVIITEELLANSLTVRLENMWQERFLSPLLGRFLEGVAAVLATPAEDVFIFNIQNDTDVGGTVLNVSFSALAPRGAGAGAAGPWFSSEELQEQLYVRRAALAARSLLDVLPFDDNVCLREPCENYMKCVSVLRFDSSAPFLASASTLFRPIQPIAGLRCRCPPGFTGDFCETELDLCYSNPCRNGGACARREGGYTCVCRPRFTGEDCELDTEAGRCVPGVCRNGGTCTDAPNGGFRCQCPAGGAFEGPRCEVAARSFPPSSFVMFRGLRQRFHLTLSLSFATVQQSGLLFYNGRLNEKHDFLALELVAGQVRLTYSTGESNTVVSPTVPGGLSDGQWHTVHLRYYNKPRTDALGGAQGPSKDKVAVLSVDDCDVAVALQFGAEIGNYSCAAAGVQTSSKKSLDLTGPLLLGGVPNLPENFPVSHKDFIGCMRDLHIDGRRVDMAAFVANNGTMAGCQAKLHFCDSGPCKNSGFCSERWGSFSCDCPVGFGGKDCQLTMAHPHHFRGNGTLSWNFGSDMAVSVPWYLGLAFRTRATQGVLMQVQAGPHSTLLCQLDRGLLSVTVTRGSGRASHLLLDQVTVSDGRWHDLRLELQEEPGGRRGHHVLMVSLDFSLFQDTMAVGSELQGLKVKQLHVGGLPPGSAEEAPQGLVGCIQGVWLGSTPSGSPALLPPSHRVNAEPGCVVTNACASGPCPPHADCRDLWQTFSCTCQPGYYGPGCVDACLLNPCQNQGSCRHLPGAPHGYTCDCVGGYFGHHCEHRMDQQCPRGWWGSPTCGPCNCDVHKGFDPNCNKTNGQCHCKEFHYRPRGSDSCLPCDCYPVGSTSRSCAPHSGQCPCRPGALGRQCNSCDSPFAEVTASGCRVLYDACPKSLRSGVWWPQTKFGVLATVPCPRGALGAAVRLCDEAQGWLEPDLFNCTSPAFRELSLLLDGLELNKTALDTMEAKKLAQRLREVTGHTDHYFSQDVRVTARLLAHLLAFESHQQGFGLTATQDAHFNENLLWAGSALLAPETGDLWAALGQRAPGGSPGSAGLVRHLEEYAATLARNMELTYLNPMGLVTPNIMLSIDRMEHPSSPRGARRYPRYHSNLFRGQDAWDPHTHVLLPSQSPRPSPSEVLPTSSSIENSTTSSVVPPPAPPEPEPGISIIILLVYRTLGGLLPAQFQAERRGARLPQNPVMNSPVVSVAVFHGRNFLRGILESPISLEFRLLQTANRSKAICVQWDPPGLAEQHGVWTARDCELVHRNGSHARCRCSRTGTFGVLMDASPRERLEGDLELLAVFTHVVVAVSVAALVLTAAILLSLRSLKSNVRGIHANVAAALGVAELLFLLGIHRTHNQVQDQGQGTCVLMTLLAQEAWGQNSGSELVCTAVAILLHYFFLSTFAWLFVQGLHLYRMQVEPRNVDRGAMRFYHALGWGVPAVLLGLAVGLDPEGYGNPDFCWISVHEPLIWSFAGPVVLVIVMNGTMFLLAARTSCSTGQREAKKTSALRTLRSSFLLLLLVSASWLFGLLAVNHSILAFHYLHAGLCGLQGLAVLLLFCVLNADARAAWMPACLGRKAAPEEARPAPGLGPGAYNNTALFEESGLIRITLGASTVSSVSSARSGRTQDQDSQRGRSYLRDNVLVRHGSAADHTDHSLQAHAGPTDLDVAMFHRDAGADSDSDSDLSLEEERSLSIPSSESEDNGRTRGRFQRPLCRAAQSERLLTHPKDVDGNDLLSYWPALGECEAAPCALQTWGSERRLGLDTSKDAANNNQPDPALTSGDETSLGRAQRQRKGILKNRLQYPLVPQTRGAPELSWCRAATLGHRAVPAASYGRIYAGGGTGSLSQPASRYSSREQLDLLLRRQLSRERLEEAPAPVLRPLSRPGSQECMDAAPGRLEPKDRGSTLPRRQPPRDYPGAMAGRFGSRDALDLGAPREWLSTLPPPRRTRDLDPQPPPLPLSPQRQLSRDPLLPSRPLDSLSRSSNSREQLDQVPSRHPSREALGPLPQLLRAREDSVSGPSHGPSTEQLDILSSILASFNSSALSSVQSSSTPLGPHTTATPSATASVLGPSTPRSATSHSISELSPDSEPRDTQALLSATQAMDLRRRDYHMERPLLNQEHLEELGRWGSAPRTHQWRTWLQCSRARAYALLLQHLPVLVWLPGYPWA

SEQ ID NO: 11862 - protein, 39 aa, Homo sapiens
  DOMAIN (12)..(28): PROTEASE POLYPROTEIN HYDROLASE ASP domain identified by eMATRIX, accession number PD00302B, p-value=3.942e-09, raw score of 9.52
  DOMAIN (6)..(31): Retroviral aspartyl protease domain identified by PFam, accession name rvp, E-value=0.0012, PFam score of 17.9
NFHSFFLLFPKHPILLLGRDLLTKFGATISLNQDRIEVF

SEQ ID NO: 11863 - protein, 69 aa, Homo sapiens
LECPRFSGTRSWGCLAEAPHLPPRVLSSPEVPKPLQIKLSPPNPPAEPLGNTLPTKRYPVWNPGPYFRD

SEQ ID NO: 11864 - protein, 86 aa, Homo sapiens
GGLSQRKAGRSSVSRPSPLEPEAPPAQASKVQEASHLETSADLTTHPRASKGPTPEPTSDPTVPRDRSQPCPSLLDPRVPCGHYYC

SEQ ID NO: 11865 - protein, 95 aa, Homo sapiens
HFGEPFFFLRQSLNSVAQAGVKWRDPSSLQPLPPGFKRFSCPSLPSSWDYRRVPPHLANFCIFMSRRGFIMLARLAQPQCDPPISASQSARITGV

SEQ ID NO: 11866 - protein, 558 aa, Homo sapiens
  DOMAIN (450)..(496): DEAD-box subfamily ATP-dependent helicases proteins domain identified by eMATRIX, accession number BL00039D, p-value=1.844e- 34, raw score of 21.67
  DOMAIN (165)..(374): DEAD/DEAH box helicase domain identified by PFam, accession name DEAD, E-value=4.8e-64, PFam score of 205.5
RIYKVQQTPQSQLFQDHPESLVKIFGSKAMQTKAKAVIDNFVKKLEENYNSECGIDTAFQPSVGKDGSTDNNVVAGDRPLIDWDQIREEGLKWQKTKWADLPPIKKNFYKESTATSAMSKVEADSWRKENFNITWDDLKDGEKRPIPNPTCTFDDAFQCYPEVMENIKKAGFQKPTPIQSQAWPIVLQGIDLIGVAQTGTGKTLCYLMPGFIHLVLQPSLKGQRNRPGMLVLTPTRELALQVEGECCKYSYKGLRSVCVYGGGNRDEQIEELKKGVDIIIATPGRLNDLQMSNFVNLKNITYLVLDEADKMLDMGFEPQIMKILLDVRPDRQTVMTSATWPHSVHRLAQSYLKEPMIVYVGTLDLVAVSSVKQNIIVTTEEEKWSHMQTFLQSMSSTDKVIVFVSRKAVADHLSSDLILGNISVESLHGDREQRDREKALENFKTGKVRILIATDLASRGLDVHDVTHVYNFDFRRNIEEYVHRIGRTGRAGRTGVSITTLTRNDWRVASELINILERANQSIPEELVSMAERFEAHQRKREMERKMERPQGRPKKFH

SEQ ID NO: 11867 - protein, 89 aa, Homo sapiens
  DOMAIN (62)..(82): INHIBIN BETA B CHAIN SIGNATURE domain identified by eMATRIX, accession number PR00671C, p-value=5.655e-09, raw score of 4.18
LKFDKSKPGLPSPAPRPLFFPLGQRDSKTRHYPSTSRLPGLSSTYPGHWGAPLISVPGPEAPPTPGIGPAPVSQDPASSCGGGKAASYS

SEQ ID NO: 11868 - protein, 38 aa, Homo sapiens
QIIFKFISLFKYKAKPQTGIIKTLCLTFTLPSDPLPIC

SEQ ID NO: 11869 - protein, 23 aa, Homo sapiens
AQEPLTWCLLPTLVPGKCEWRQV

SEQ ID NO: 11870 - protein, 62 aa, Homo sapiens
GAKGFHLNCEGRRNRLTASSRPFHRTDSHTLVPSVQGAGAQEPMTWCLLPTLVPGKCEWRQA

SEQ ID NO: 11871 - protein, 72 aa, Homo sapiens
PRDKVSLCHRLECNGRITAHCSLKLLNSSDLPASASQVAGTTGVCHHAWPLLFFLMKEEMYRIDIKTKCRKN

SEQ ID NO: 11872 - protein, 24 aa, Homo sapiens
  misc_feature (1)...(24): Xaa = X or * as defined in Table 2
DLPQAQSNLQWPRKTSXLKPHERL

SEQ ID NO: 11873 - protein, 94 aa, Homo sapiens
AYEVGYNTVATSEGGNRARRVGELPEVTELVSGPDWNPNTSQPMPGSPAPAPRRLPGCQRHPHPFKCCPVPAPQSLPFNTRPHLPPTPQGQASR

SEQ ID NO: 11874 - protein, 51 aa, Homo sapiens
ARCEWLMPVIPALWEAEACGSLEPRSSRPAWATWLMNTKHSFDVFHIKDFL

SEQ ID NO: 11875 - protein, 76 aa, Homo sapiens
SSEMAASGRGLCKAVAVSPFPAWRRDNTEARGGLKPEYDAVVIGAGHNGLVAVSTSPLDPTSLALGVWLSAAWEGV

SEQ ID NO: 11876 - protein, 470 aa, Homo sapiens
  DOMAIN (161)..(175): C2H2-TYPE ZINC FINGER SIGNATURE domain identified by eMATRIX, accession number PR00048A, p-value=1.000e-09, raw score of 10.52
  DOMAIN (100)..(327): Zinc finger, C2H2 type domain identified by PFam, accession name zf-C2H2, E-value=1e-34, PFam score of 128.8
HLSQACPFAGHQGSWGRSSFHLQPRMIGDGLSEDENDTKQNAQSSDESFEPYPERKVSGKKSESKEAKKSEEPRIRKKPGPKPGWKKKLRCEREELPTIYKCPYQGCTAVYRGADGMKKHIKEHHEEVRERPCPHPGCNKVFMIDRYLQRHVKLIHTEVRNYICDECGQTFKQRKHLLVHQMRHSGAKPLQCEVCGFQCRQRASLKYHMTKHKAETELDFACGQCGRRFEKAHNLNVHMSMVHPLTQTQDKALPLEAEPPPGPPSPSVTTEGPGRCEVCGFQCRQRASLKYHMTKHKAETELDFACDQCGRRFEKAHNLNVHMSMVHPLTQTQDKALPLEAEPPPGPPSPSVTTEGQAPPRPPDRAAPEAAAVLRVQRPVSRREQSSRASPRLLPPDPQPRKPTAAALAEPPLHAVPARAQRSPAAPGQSPHAPTPTRPRGVSLTPGGHRIWIARQGQLVRGPGAVPGDV

SEQ ID NO: 11877 - protein, 211 aa, Homo sapiens
YALLGTRAASSRSCGAATRATTTPWIPAPAARPSCWTVRWQSSGHGTKKRASRLPPPRRVKPWGFPLSPSKLEGQGPQGGLRPKTLPSRNVAKLLSDSNALGPRSGFPPQPSLPLCRAPGQLGEKQLPFSTSDDRVKDEFSDLSEGDVLSEDENDKKQNAQSSDESFEPYPERKVSGKKSESKEAKKSEEPRIRKKPGPKPGWKKKLRCER

SEQ ID NO: 11878 - protein, 1465 aa, Homo sapiens
  DOMAIN (1356)..(1380): FANCONI ANAEMIA GROUP A PROTEIN SIGNATURE domain identified by eMATRIX, accession number PR00826G, p-value=1.143e-30, raw score of 13.17
AAAGAVGAKAMSDSWVPNSASGQDPGGRRRAWAELLAGRVKREKYNPERAQKLKESAVRLLRSHQDLNALLLEVEGPLCKKLSLSKVIDCDSSEAYANHSSSFIGSALQDQASRLGVPVGILSAGMVASSVGQICTAPAETSHPVLLTVEQRKKLSSLLEFAQYLLAHSMFSRLSFCQELWKIQSSLLLEAVWHLHVQGIVSLQELLESHPDMHAVGSWLFRNLCCLCEQMEASCQHADVARAMLSDFVQMFVLRGFQKNSDLRRTVEPEKMPQVTVDVLQRMLIFALDALAAGVQEESSTHKIVRCWFGVFSGHTLGSVISTDPLKRFFSHTLTQILTHSPVLKASDAVQMQREWSFARTHPLLTSLYRRLFVMLSAEELVGHLQEVLETQEVHWQRVLSFVSALVVCFPEAQQLLEDWVARLMAQAFESCQLDSMVTAFLVVRQAALEGPSAFLSYADWFKASFGSTRGYHGCSKKALVFLFTFLSELVPFESPRYLQVHILHPPLVPSKYRSLLTDYISLAKTRLADLKVSIENMGLYEDLSSAGDITEPHSQALQDVEKAIMVFEHTGNIPVTVMEASIFRRPYYVSHFLPALLTPRVLPKVPDSRVAFIESLKRADKIPPSLYSTYCQACSAAEEKPEDAALGVRAEPNSAEEPLGQLTAALGELRASMTDPSQRDVISAQVAVISERLRAVLGHNEDDSSVEISKIQLSINTPRLEPREHIAVDLLLTSFCQNLMAASSVAPPERQGPWAALFVRTMCGRVLPAVLTRLCQLLRHQGPSLSAPHVLGLAALAVHLGESRSALPEVDVGPPAPGAGLPVPALFDSLLTCRTRDSLFFCLKFCTAAISYSLCKFSSQSRDTLCSCLSPGLIKKFQFLMFRLFSEARQPLSEEDVASLSWRPLHLPSADWQRAALSLWTHRTFREVLKEEDVHLTYQDWLHLELEIQPEADALSDTERQDFHQWAIHEHFLPESSASGGCDGDLQAACTILVNALMDFHQSSRSYDHSENSDLVFGGRTGNEDIISRLQEMVADLELQQDLIVPLGHTPSQEHFLFEIFRRRLQALTSGWSVAASLQRQRELLMYKRILLRLPSSVLCGSSFQAEQPITARCEQFFHLVNSEMRNFCSHGGALTQDITAHFFRGLLNACLRSRDPSLMVDFILAKCQTKCPLILTSALVWWPSLEPVLLCRWRRHCQSPLPRELQKLQEGRQFASDFLSPEAASPAPNPDWLSAAALHFAIQQVREENIRKQLKKLDCEREELLVFLFFFSLMGLLSSHLTSNSTTDLPKAFHVCAAILECLEKRKISWLALFQLTESDLRLGRLLLRVAPDQHTRLLPFAFYSLLSYFHEDAAIREEAFLHVAVDMYLKLVQLFVAGDTSTVSPPAGRSLELKGQGNPVELITKARLFLLQLIPRCPKKSFSHVAELLADRGDCDPEVSAALQSRQQAAPDADLSQEPHLF

SEQ ID NO: 11879 - protein, 70 aa, Homo sapiens
EKSTLNNPMFCIWEIVFKNKKERKYIKLLFIPAFPYISIALSVYPFWYILPLHIYICICNSELYIYINCK

SEQ ID NO: 11880 - protein, 44 aa, Homo sapiens
SITFWLKGCMCIGVCVCVCVCVFGLVWRMKKGFHLGICKYSMAS

SEQ ID NO: 11881 - protein, 243 aa, Homo sapiens
  DOMAIN (44)..(76): Bacterial-type phytoene dehydrogenase proteins domain identified by eMATRIX, accession number BL00982A, p-value=6.301e- 13, raw score of 18.41
  DOMAIN (45)..(119): Pyridine nucleotide-disulphide oxidoreducta domain identified by PFam, accession name pyr_redox, E-value=9.1e-06, PFam score of 22.2
FVPGAEMAASGRCLCKAVAASPFPAWRRDNTEARGGLKPEYDAGVIGAGHNGLVAAAYLQRLGVNTAVFERRHVIGGAAVTEEIIPGFKFSRASYLLSLLRPQIYTDLELKKHGLRLHLRNHYSFTPMRKRVQAAKVPRCLLLGTDMAENQKQIAQFSQKDAQVFPKYEEFMHRLALAIDPLLDAAPVDMAAFQHGSLLQKRRALSTLKPLLKAGRILGAQLPRYYEVLTASITKVLDQWFES

SEQ ID NO: 11882 - protein, 94 aa, Homo sapiens
GMVLNGSAGPHASPWSNHGSQRDGSLTASLGHLPRCCGHMPLTEGQKCSWGQQREQPPQSSEECRHRSHRAAPHHPCALHPSTIELGKVLIVLV

SEQ ID NO: 11883 - protein, 85 aa, Homo sapiens
  misc_feature (1)...(85): Xaa = X or * as defined in Table 2
MLNLASPLDKLTLQNTTQNGDSSTHISSNSIHKHTSSSSSVLFPDGTLEALFVSSPKVEASPLEAXVPCSASHSCNTSSKLNRRL

SEQ ID NO: 11884 - protein, 116 aa, Homo sapiens
QASNGDASTLGEETKSASNVPSGKSTDEEEEAQTPQAPRTLGPSPPAPSSTPTPTAPIATLNQPPPLLRPTLPAAPALHRQPPPLQQQARFIQPRPTLNQPPPPLIRPANSMATPS

SEQ ID NO: 11885 - protein, 29 aa, Homo sapiens
FMFFNQICKCICCCIVIVLQNKIACHLTA

SEQ ID NO: 11886 - protein, 32 aa, Homo sapiens
MEECTDCGDPSPTHTHTHTHTPYSNTASRGII

SEQ ID NO: 11887 - protein, 41 aa, Homo sapiens
AHAYLYGKVRKSTMTKPCGRTKRKRRRRTSSSSQDGLALPP

SEQ ID NO: 11888 - protein, 104 aa, Homo sapiens
ERGLLSPDRLSLVPPWHWERRGAGPRTPVGRGLYLLAPKAYKEVSGPVHGQMGPGKTLRVGIQWTRRSQMCCFYGCPLPPPVHPLCPGNKEPLRTQESPHPPSC

SEQ ID NO: 11889 - protein, 37 aa, Homo sapiens
GVGTATTGQWYFGQLAVCGVCGFLGLHSIKTSGWLSA

SEQ ID NO: 11890 - protein, 150 aa, Homo sapiens
GRRPSPQETPRPTSLSGAPPTPRHSRCPPNHTVSSASLSLPSRHRLFLTYRHCRNFSILLEPSGCSKDTFLLLAIKSQPGHVERRAAIRSTWGRVGGWAMGRHLKTDGSSYGWHDARTPTQLMAYESREFDDILQWDFTEDFFNLTLKEL

SEQ ID NO: 11891 - protein, 47 aa, Homo sapiens
  DOMAIN (22)..(42): Immunoreceptor tyrosine-based activation mot domain identified by PFam, accession name ITAM, E-value=0.00034, PFam score of 27.4
KIRCEGLSRLDKGERRRGKGHDGLYQGLSTATKDTYDAFHMQALPPR

SEQ ID NO: 11892 - protein, 88 aa, Homo sapiens
PLESGGIPKLVQPRLLPVGPGGLFLGLWRLGGWSQGCAAETPVGLWVGSCPHRLLTHSLFSDLLSRQGLSTATKDTYDALHMQALPPR

SEQ ID NO: 11893 - protein, 223 aa, Homo sapiens
  DOMAIN (128)..(218): Immunoreceptor tyrosine-based activation mot domain identified by PFam, accession name ITAM, E-value=1.9e-21, PFam score of 84.7
GECEFLGLSAGAFSKAPQSSTSWGGSCRIKPAETPFLLTVPATAASASASQPLSEGKDKMKWKALFTAAILQAQLPITEAQSFGLLDPKLCYLLDGILFIYGVILTALFLRVKFSRSADAPAYQQGQNQLYNELNLGRREEYDVLDKRRGRDPEMGGKPHRTKNPHEGLYNELQKDKMAEAYSEIGMKGERRRGKGHDGLYQGLSTATKDTYDALHMQALPPR

SEQ ID NO: 11894 - protein, 131 aa, Homo sapiens
DCMTHCLQPFSWCMPFNATLLFQHCKTMSANQAPPYRHVVFKHKTTKKEKEKRERRSLPQNPFSMCLDSKCTGMQLLPSVNSFKPLEMVALCAQYPGHQGIHRAGPAPGCWLSKQKDKCPSLFVKAVVSVL

SEQ ID NO: 11895 - protein, 128 aa, Homo sapiens
ALISNNYHDMCYLCAYCCTAFFGFLTRATAEQKHFSLVWHLMNLINVCYGKSIPLYNFMGEAMCKSEFKKKEKKKPCAELLPTQYIIYMPEMAKAAICQGLQKHEEAGMEINTLVVCNVFKVGVFNDT

SEQ ID NO: 11896 - protein, 60 aa, Homo sapiens
GQGNRKKGFLGLERGHAGAGGREPFSPAGKLQGGRKAFAPGIIWGVPNPQLNIGVGMPWP

SEQ ID NO: 11897 - protein, 96 aa, Homo sapiens
KSPSHPQPENRRRRCPHSCHAPTTCVSRKSGFSFKAKTLGTVLEQGRSGGIYSHGHCVAGSLTQTAGETGPWEGQHVGLQTSLSSSLPLQFLRMGH

SEQ ID NO: 11898 - protein, 92 aa, Homo sapiens
VQRHCLAGLIHHPFQKWNPKDQILDPIWRQGRRSTSPRAPGRRGPGARGPAPSPAPRGRRRWRAGFRQRTPHTGPPAPTKAKTLLAGREPPR

SEQ ID NO: 11899 - protein, 135 aa, Homo sapiens
SFVVDNEKKEVQHVRDDADDAELLQHKVQNVGQVQGPHARHDGGRHEDQSRHSACCHAWRQGRRSTSPRAPGRRGPGARGPAPSPAPRGRRRWRAGFRQRTLHTGPPAPTAAPTLLAGREPPSSRGRVGGRVGRP

SEQ ID NO: 11900 - protein, 129 aa, Homo sapiens
GGTGAMAPWAGGEHSRMNPLRAVWLTLTAAFLLTLLLQLLPPGLLPGCAIFQDLIRYGKTKCGEPSRPVACRAFDVPKRYFSHLYTISFLWNDISAFWLFLFFLFLTPLFSYLRFLFHSHLASCFHFLV

SEQ ID NO: 11901 - protein, 66 aa, Homo sapiens
  DOMAIN (14)..(42): !!!! PROTEIN ALU SUBFAMILY WARNING ENTRY NUCLEAR PHOSPHO domain identified by eMATRIX, accession number PD02454B, p-value= 2.169e-14, raw score of 11.61
SQHFGRSRWVDCLSSRVRDQPGQCHETPSLQKITKISWAWWRMPIVPATWEVEVGGLLEPRRQRLQ

SEQ ID NO: 11902 - protein, 49 aa, Homo sapiens
  misc_feature (1)...(49): Xaa = X or * as defined in Table 2
QDLFSSSRQLEAFSNTCKRTQRTCRTNRMYRXRYSCGGTEXGSYPTNLE

SEQ ID NO: 11903 - protein, 67 aa, Homo sapiens
LRRQLQTVTCGLGHLFVMCFTFPCFPVNWLPWFCRVVSRSCGCSRAGDACPSGSNPPPCPQCLTPGF

SEQ ID NO: 11904 - protein, 39 aa, Homo sapiens
  misc_feature (1)...(39): Xaa = X or * as defined in Table 2
XQCPLNRMAGHISSPYRSEAVVSSPGAPVRTGPSWEPGK

SEQ ID NO: 11905 - protein, 154 aa, Homo sapiens
ALSSWPARELALLSERHPSLLLLQRQCPLNRMAGHISSPYRSEAVVSSPGSTSEDRPQLGARARWESSVLTTLGARVSERPRLEKVRNPCVLLPTPARLARPHSSPSLAQSPGPGGRGRGWLRSRAGPSHSATHIAPSPLSSQLWSLRWCHDRL

SEQ ID NO: 11906 - protein, 84 aa, Homo sapiens
YHDGINIKYQTHKVIKMENLQFYLFISSAPQCVSTKGCSGYLRPVGLVQVTICPLPLQIKVQIEKYLGFRTHQRYFCCIFHLKN

SEQ ID NO: 11907 - protein, 319 aa, Homo sapiens
  DOMAIN (134)..(151): OXYTOCIN RECEPTOR SIGNATURE domain identified by eMATRIX, accession number PR00665D, p-value=9.012e-11, raw score of 9.93
  DOMAIN (49)..(267): 7 transmembrane receptor (rhodopsin family) domain identified by PFam, accession name 7tm_1, E-value=1.4e-37, PFam score of 121.6
METSSPRPPRPSSNPGLSLDARLGVDTHLWAKVLFTALYALIWALGAAGNALSVHVVLKARAGRAGRLRHHVLSLALAGLLLLLVGVPVELYSFVWFHYPWVFRDLGCRGYYFVHELCAYATVLSVAGLSAERCLAVCQPLRARSLLTPRRTRWLVALSWAASLGLALPMAVIMGQKHELETADGEPEPASRVCTVLVSRTALQVFIQEAIVVMYVICWLPYHARRLMYCYVPDDAWTDPLYNFYHYFYMVTNTLFYVSSAVTPLLYNAVSSSFRKLFLEAVSSLCGEHHPMKRLPPKPQSPTLMDTASGFGDPPETRT

SEQ ID NO: 11908 - protein, 65 aa, Homo sapiens
MTRCGSLGPSPLQGVYMATVRRGDSVWWGTECGRDSPAVRVSLFLLCSCWGWWSRGLTPWRPCGP

SEQ ID NO: 11909 - protein, 34 aa, Homo sapiens
  misc_feature (1)...(34): Xaa = X or * as defined in Table 2
MFMDXXXXXXGGRFKGSLGGPKFTRACKVKFFSL

SEQ ID NO: 11910 - protein, 57 aa, Homo sapiens
  misc_feature (1)...(57): Xaa = X or * as defined in Table 2
ASAMVTSTSTPGSILMEVICLTISEGLCKSMSRLXILIWKRSHVLEPSPQGVFLVVI

SEQ ID NO: 11911 - protein, 65 aa, Homo sapiens
  misc_feature (1)...(65): Xaa = X or * as defined in Table 2
PSFLETEPCSIAQARVGWHDLGSLQPLPPGSSNSPASASQVAGITGAXHHARLIFLFFVEMGCAE

SEQ ID NO: 11912 - protein, 96 aa, Homo sapiens
  DOMAIN (37)..(76): PROTEIN ZINC FINGER ZINC-FINGER METAL-BINDING NU domain identified by eMATRIX, accession number PD01066, p-value=9.727e-20, raw score of 19.43
  DOMAIN (35)..(96): KRAB box domain identified by PFam, accession name KRAB, E- value=5.7e-07, PFam score of 36.6
  misc_feature (1)...(96): Xaa = X or * as defined in Table 2
MWAPREQLLGWAAEALPAKDSAWPWEEKPRYLGPVTFEDGAVLFTEAEWKRLSLEQRNLYQEAMLENLRNLGSLXXXXXXXXXXXLALDLNLGFWL

SEQ ID NO: 11913 - protein, 41 aa, Homo sapiens
MRMQQPSVKPGFKDLQKCKTMPLLLMKYIVLENIGLKIFLR

SEQ ID NO: 11914 - protein, 113 aa, Homo sapiens
  misc_feature (1)...(113): Xaa = X or * as defined in Table 2
AQDRLHWGQTQNQQRGGHALVPAEVXWDHPSWQINSRFYPKEQXKVFSTSSSSSSGGAVLKNPWGGQSLRGLARKNLFPYRGPNKNLPGNFGKETLLWGGDKLGQPPSRNLRL

SEQ ID NO: 11915 - protein, 420 aa, Homo sapiens
  DOMAIN (144)..(161): OXYTOCIN RECEPTOR SIGNATURE domain identified by eMATRIX, accession number PR00665D, p-value=9.012e-11, raw score of 9.93
  DOMAIN (59)..(368): 7 transmembrane receptor (rhodopsin family) domain identified by PFam, accession name 7tm_1, E-value=2.5e-50, PFam score of 162.0
EGGSAGRGSGMETSSPRPPRPSSNPGLSLDARLGVDTRLWAKVLFTALYALIWALGAAGNALSVHVVLKARAGRAGRLRHHVLSLALAGLLLLLVGVPVELYSFVWFHYPWVFGDLGCRGYYFVHELCAYATVLSVAGLSAERCLAVCQPLRARSLLTPRRTRWLVALSWAASLGLALPMAVIMGQKHELETADGEPEPASRVCTVLVSRTALQVFIQVNVLVSFVLPLALTAFLNGVTVSHLLALCSQVPSTSTPGSSTPSRLELLSEEGLLSFIVWKKTFIQGGQVSLVRHKDVRRIRSLQRSVQVLRAIVVMYVICWLPYHARRLMYCYVPDDAWTDPLYNFYHYFYMVTNTLFYVSSAVTPLLYNAVSSSFRKLFLEAVSSLCGEHHPMKRLPPKPQSPTLMDTASGFGDPPETRT

SEQ ID NO: 11916 - protein, 103 aa, Homo sapiens
IKPREPNFPAARLCRLVYPFYPLKFFIFPKAFNFCREVGPICSPPKGRVLSQNSQVADFPVPAFLKHGPGLGFNSAPHKEKNFTLQARVKFGPPQGSFKTGPP

SEQ ID NO: 11917 - protein, 430 aa, Homo sapiens
  DOMAIN (130)..(172): Fork head domain proteins domain identified by eMATRIX, accession number BL00657A, p-value=5.846e-35, raw score of 19.39
  DOMAIN (130)..(225): Fork head domain identified by PFam, accession name Fork_head, E-value=2.2e-54, PFam score of 194.1
PPPRRVPADMAESWLRLSGAGPAEEAGPEGGLEEPDALDDSLTSLQWLQEFSILNAKAPALPPGATDPHGYHQVPGSAAPGSPLAADPACLGQPHTPGKPTSSCTSRSAPPGLQAPPPDDVDYATNPHVKPPYSYATLICMAMQASKATKITLSAIYKWITDNFCYFRHADPTWQNSIRHNLSLNKCFIKVPREKDEPGKGGFWRIDPQYAERLLSGAFKKRRLPPVHIHPAFARQAAQEPSAVPRAGPLTVNTEAQQLLREFEEATGEAGWGAGEGRLGHKRKQPLPKRVAKVPRPPSTLLPTPEEQGELEPLKGNFDWEAIFDAGTLGGELGALEALELSPPLSPASHVDVDLTIHGRHIDCPATWGPSVEQAADSLDFDETFLATSFLQHPWDESGSGCLPPEPLFEAGDATLASDLQDWASVGAFL

SEQ ID NO: 11918 - protein, 149 aa, Homo sapiens
  misc_feature (1)...(149): Xaa = X or * as defined in Table 2
AQKESRSAVQRSWKLKPLIVLSPLQTGLTVQSTWSTCPVSRLVTLSQLLGVHSRSLSSRCRDEGFSDTDPEATEPQGNPNPPSCXGAGTAWGRMEPPAPQHPGDFPTPLXMSWCXDCVNPKTTHGPVLWPPFEAKTKQPDTLCSGAGLY

SEQ ID NO: 11919 - protein, 113 aa, Homo sapiens
  misc_feature (1)...(113): Xaa = X or * as defined in Table 2
ASTREVSLSGRTWPMIMVVPPTSAAWGMSLLSCTPLCFLPCRLSDRXPCSKASFSSDPRSSRRQVEWHLVKALPSPPSEDAPPPPARNSPAEASPVMPQNFLISAKPNPLASL

SEQ ID NO: 11920 - protein, 60 aa, Homo sapiens
  misc_feature (1)...(60): Xaa = X or * as defined in Table 2
FPGLGPHPCSNGCHLPXAPSPPLLPGXPPLSSQPLSEERGSEGRSEGVDAAHTARLAPNG

SEQ ID NO: 11921 - protein, 89 aa, Homo sapiens
ESTSRSLSSRCRDEGFSDTDPEAKRTTRKPKPPPAAEGAGTAWGRMEPPAPKHPGDFPPSPVKCHGAKTVSTPRRHMGPVLWPPFLGKN

SEQ ID NO: 11922 - protein, 361 aa, Homo sapiens [sequence omitted]

SEQ ID NO: 11923 - protein, 91 aa, Homo sapiens
NRLQSHHHSHPPLHRPQKRRNHLYFLPHTDYSHPPPFETPREKEDHCSTPHFHEAPLYKTPYFPHPRFSWIFNFVELLPDPELNPLLSFAT

SEQ ID NO: 11924 - protein, 22 aa, Homo sapiens
PDKTNHILILLEHIAVVKNNGL

SEQ ID NO: 11925 - protein, 81 aa, Homo sapiens
  DOMAIN (28)..(46): THYROTROPHIN-RELEASING HORMONE RECEPTOR SIGNATURE domain identified by eMATRIX, accession number PR00751I, p-value=8.545e- 09, raw score of 12.59
TCFFIFLSFFQVFFIFLLFNVIIFTVFSSHFFNLFFLLFCLFFIHHFFFDQPLHHAGLDLDLSHARIGHGPSRRRRRRGGE

SEQ ID NO: 11926 - protein, 52 aa, Homo sapiens
GFYLINAGSFRRLLFTYFMRIYTVKQNHQLFLPFLVKKEQNVGNLWNYNIFR

SEQ ID NO: 11927 - protein, 94 aa, Homo sapiens
  DOMAIN (46)..(64): THYROTROPHIN-RELEASING HORMONE RECEPTOR SIGNATURE domain identified by eMATRIX, accession number PR00751I, p-value=8.545e- 09, raw score of 12.59
  misc_feature (1)...(94): Xaa = X or * as defined in Table 2
RSKYAASKPALAIWDHHPGNLVRISAVHXRHTWFKLLFNVIIFTVFSSHFFNLFFLLFCLFFIHHFFFDQPGHCHLCVTPATCVRHLGIMRKSC

SEQ ID NO: 11928 - protein, 41 aa, Homo sapiens
GRALLKYVSPPSSLWNSVPPDPNSPQPCPLKKKNPGGLGTP

SEQ ID NO: 11929 - protein, 43 aa, Homo sapiens
IPELLVSSDPPDSASRVAGTTGTCYCTSLQRDFFYFIQVTNSC

SEQ ID NO: 11930 - protein, 138 aa, Homo sapiens
  misc_feature (1)...(138): Xaa = X or * as defined in Table 2
RITFQERLQARSRREVGSARPKTARQVCRLPAAAAKSPLARSRSACFRCLQKVTEERECGRITGSPXTSSFTKTLRTITPFTSHKRRVGIIQSNQPPEPDSNDRTLRPEPECGCWSESWAPPHFASSNRGLPGSESME

SEQ ID NO: 11931 - protein, 127 aa, Homo sapiens
PLESRRLARSSGGWAGITGTPMNIFTGPDPGPSERSAQPRVWDSTCCLKSNCWFRKVKATTPPMSSMMRQIPRMYMNAWRRYRLSRRDASTPMKETMNMTTPRRMRMMAGARKALSRVLYFCRSTSA

SEQ ID NO: 11932 - protein, 166 aa, Homo sapiens
  DOMAIN (62)..(101): PROTEIN ZINC FINGER ZINC-FINGER METAL-BINDING NU domain identified by eMATRIX, accession number PD01066, p-value=4.882e-27, raw score of 19.43
  DOMAIN (60)..(112): KRAB box domain identified by PFam, accession name KRAB, E- value=2.4e-18, PFam score of 74.4
TGTPVSTISWCCYLVCLLLACVRAQMWAPREQLLGWTAEALPAKDSAWPWEEKPIYLGPVTFEDVAVLFTEAEWKRLSLEQRNLYKEVMLENLRNLVSLAESKPEVHTWPFCPLGFGSQQFLSQDELHNHPIPGFHAGNQLHPGNPCPEDQPQSQHPSDKNHRGAE

SEQ ID NO: 11933 - protein, 14 aa, Homo sapiens
  misc_feature (1)...(14): Xaa = X or * as defined in Table 2
TFVKNXDRSKHITY

SEQ ID NO: 11934 - protein, 30 aa, Homo sapiens
RERLREREREREREREREMFRPQLLLPFFF

SEQ ID NO: 11935 - protein, 53 aa, Homo sapiens
PCPDSTQLKFFFKHNFWGQVQWLTSVIPALWEAEAEGLLECQEFKTSTVKDLA

SEQ ID NO: 11936 - protein, 43 aa, Homo sapiens
DYCNHSEKRRWQLGPVGSSRVVTRKFKVTPVTPILLLRENTER

SEQ ID NO: 11937 - protein, 133 aa, Homo sapiens
DIRPTPKSPFAMSLCVLLTNTPGRAGHGRRGLCGKPGSGRRRTGAPARTWQGGHEGDKMGREGAESQAQVQLLTASPPACPAASFSSSPSSASAVGSPASPGSTPQAKATSTDNCSVLSDTSAMAGSSWSGAC

SEQ ID NO: 11938 - protein, 549 aa, Homo sapiens
  DOMAIN (42)..(81): PROTEIN ZINC FINGER ZINC-FINGER METAL-BINDING NU domain identified by eMATRIX, accession number PD01066, p-value=7.857e-32, raw score of 19.43
  DOMAIN (295)..(542): Zinc finger, C2H2 type domain identified by PFam, accession name zf-C2H2, E-value=8.7e-50, PFam score of 178.8
FRSRKARSDLRYLPGRFIFPGTLPFPRRRRGKMTKFQEAVTFKDVAVAFTEEELGLLDSAQRKLYRDVMLENFRNLVSVGHQSFKPDMISQLEREEKLWMKELQTQRGKHSGDRNQNEMATLHKAGLRCFSLGELSCWQIKRHIASKLARSQDSTINIEGKSSQFPKHHDSPCQVGAGESIQASVDDNCLVNHIGDHSSIIENQEFPTGKVPNSWSKIYLNETQNYQRSCKQTQMKNKLCIFAPYVDIFSCISHHHDDNIVHKRDKVHSNSDCGKDTLKVSPLTQRSIHTGQKTYQGNECEEAFNDSSSLELHKQVHLGKKSPACSTHEKDTSYSSGIPVQQSVRTGKKRYWCHECGKGFSQSSNLQTHQRVHTGEKPYTCHECGKSFNQSSHLYAHLPIHTGEKPYRCDSCGKGFSRSTDLNIHCRVHTGEKPYKCEVCGKGFTQRSHLQAHERIHTGEKPYKCGDCGKRFSCSSNLHTHQRVHTEEKPYKCDECGKCFSLSFNLHSHQRVHTGEKPYKCEECGKGFSSASSFQSHQSARGQIFKSIR

SEQ ID NO: 11939 - protein, 486 aa, Homo sapiens
  DOMAIN (442)..(453): GLUCAGON POLYPEPTIDE HORMONE SUPERFAMILY SIGNATURE domain identified by eMATRIX, accession number PR00275A, p-value=8.500e- 13, raw score of 10.76
  DOMAIN (393)..(469): Peptide hormone domain identified by PFam, accession name hormone2, E-value=6.9e-21, PFam score of 82.8
MHSSVYSSPAAAGLRFPGIRVSITEEGVFKTMSSEPLLNNGSRDSEDEETSLHGTRQVPLQLLLEVIGAEFPGGSPAGAAAQRGQNPSSDPCHAALRPYRSHFPHGQGQIFMNRKALLQRDVKHAQLDNGHEQQKISVAAAEAAASEAAGETSEQRRRRRPSRLPGPRLLQRRASRPPSPLPSSPSFLTFPLSLNRLLLPPGGLTATLLLRASPHRPLFLSSASLSAPPSLRVTLPPGSARLQTFEQNTSLGKRVPQLLLLLPLVPAASAQTPTPDGDASRVVTPAQELEEALCPPSYLAALLAAGGVEGMTMCSGARLALLVYGIIMHSSVYSSPAAAGLRFPGIRPEEEAYGEDGNPLPDFGGSEPPGAGSPASAPRAAAAWYRPAGRRDVAHGILNEAYRKVLDQLSAGKHLQSLVARGVGGSLGGGAGDDAEPLSKRHSDGIFTDSYSRYRKQMAVKKYLAAVLGKRYKQRVKNKGRRIAYL

SEQ ID NO: 11940 - protein, 82 aa, Homo sapiens
CFLPFLQPRVAPITPNKRTRFAQDVPKCPPGPWLSCAWTCPEGSRARPYAGPLCPGRRCRDSPSGRPWGQPVLWTLPCFAYV

SEQ ID NO: 11941 - protein, 125 aa, Homo sapiens
ENAAWCRWDSTVLCSRGGKQEKRPTWAQELGAGRAEGEFAAYGRAGQRRGVPQWARRMSWSRLWRPAAYRGELVERIRECTAAREACQEQECGCERRESSFLPKRGEVFDAGHGGESMVWVRHGR

SEQ ID NO: 11942 - protein, 61 aa, Homo sapiens
NTHTHTHTHTHTHTHTHTQCIVCFQQYNKHCKIFMGVKTMPHYLKTGSFSLNSRCSSVRLL

SEQ ID NO: 11943 - protein, 662 aa, Homo sapiens
  DOMAIN (470)..(517): Inward rectifier potassium channel domain identified by eMATRIX, accession number PF01007A, p-value=8.636e-09, raw score of 17.16
  DOMAIN (302)..(505): Regulator of G protein signaling domain identified by PFam, accession name RGS, E-value=0.0075, PFam score of 14.6
MRGAGPSPRQSPRTLRPDPGPAMSFFRRKVKGKEQEKTSDVKSIKASISVHSPQKSTKNHALLEAAGPSHVAINAISANMDSFSSSRTATLKKQPSHMEAAHFGDLGRSCLDYQTQETKSSLSKTLEQVLHDTIVLPYFIQFMELRRMEHLVKFWLEAESFHSTTWSRIRAHSLNTMKQSSLAEPVSPSKKHETTASFLTDSLDKRLEDSGSAQLFMTHSEGIDLNNRTNSTQNHLLLSQECDSAHSLRLEMARAGTHQVSMETQESSSTLTVASRNSPASPLKELSGKLMKSIEQDAVNTFTKYISPDAAKPIPITEAMRNDIIARICGEDGQVDPNCFVLAQSIVFSAMEQEHFSEFLRSHHFCKYQIEVLTSGTVYLADILFCESALFYFSEYMEKEDAVNILQFWLAADNFQSQLAAKKGQYDGQEAQNDAMILYDKYFSLQATHPLGFDDVVRLEIESNICREGGPLPNCFTTPLRQAWTTMEKVFLPGFLSSNLYYKYLNDLIHSVRGDEFLGGNVSPTAPGSVGPPDESHPGSSDSSASQSSVKKASIKILKNFDEAIIVDAASLDPESLYQRTYAGKMTFGRVSDLGQFIRESEPEPDVRKSKGSMFSQAMKKWVQGNTDEAQEELAWKIAKMIVSDIMQQAQYDQPLEKSTKL

SEQ ID NO: 11944 - protein, 33 aa, Homo sapiens
AFEENLLRVCKKLYSVFTQMPKMNFANVFIGAN

SEQ ID NO: 11945 - protein, 79 aa, Homo sapiens
  DOMAIN (41)..(61): RIBOSOMAL PROTEIN L5 SIGNATURE domain identified by eMATRIX, accession number PR00058A, p-value=8.958e-09, raw score of 16.66
  misc_feature (1)...(79): Xaa = X or * as defined in Table 2
SCERARFWAAAVAGVAATRVRRRLAITGLTMERKVLALHARKKRTKAKKDKAQRKXRLVPQHPILWIFLRHLLCSGFTS

SEQ ID NO: 11946 - protein, 23 aa, Homo sapiens
  misc_feature (1)...(23): Xaa = X or * as defined in Table 2
GVWRPLSGCNASSSAXSQEPCTT

SEQ ID NO: 11947 - protein, 426 aa, Homo sapiens
MGFRQSFEKKKKKKRPGESSLPGQFCSDDRSLRVGLCPSASPGSSPSLSAQRTQGPEPQRGRITGEGPSAPGRQGDPQGSGPSPGACCRAATLREGKAQGASQNRAPAPPPTSRSGPECCTRWTAYLRHEAWHQIGPRSRIAKPRREKEPWYTGLPNTKGIPRLRYEEGDPGHNGSGTAAGIRVRSAASQARAVWDPSARTPAPAKEPGMAQLERSAISGFSSKSRRNSFAYDVKREVYNEETFQQEHKRKASSSGNMNINITTFRHHVQCRCSWHRFLRCVLTIFPFLEWMCMYRLKDWLLGDLLAGISVGLVQVPQGLTLSLLARQLIPPLNIAYAAFCSSVIYVIFGSCHQMSIGSFFLVSALLINVLKVSPFNNGQLVMGSFVKNEFSAPSYLMGYNKSLSVVATTTFLTGIIQKSSTTDLG

SEQ ID NO: 11948 - protein, 107 aa, Homo sapiens
  misc_feature (1)...(107): Xaa = X or * as defined in Table 2
PVISSSVCRASPKSRIFSSQSSFTARLLGFRSLXIMSAECIYFRPRRIWXIRNXTWSSVSFXHFHNVVQICPHEMGHQIHIIEFLQRPCRCKNVQQTNHIFMFHMFK

SEQ ID NO: 11949 - protein, 997 aa, Homo sapiens
  DOMAIN (362)..(414): Sulfate transporters proteins domain identified by eMATRIX, accession number BL01130B, p-value=6.294e-25, raw score of 23.34
  DOMAIN (51)..(154): Eukaryotic protein kinase domain identified by PFam, accession name pkinase, E-value=2.8e-15, PFam score of 59.0
VIGLLDVFTPARSLEEFNDVHCSRYFRYYREQKITLSSTNIVQADNNKQQYLVTHLMGADLNNIVKCQKLTDDHVQFLIYQILRGLKGLNKQVNNFSNGKFKHIKSQDLKPSNLAVNEDCELKILDFGLARHTDDEMTGYVATRWYRAPEIMLNWMHYNQTGMAQLERSAISGFSSKSRRNSFAYDVKREVYNEETFQQEHKRKASSSGNMNINITTFRHHVQCRCSWHRFLRCMLTIFPFLEWMCMYRLKDWLLGDLLAGISVGLVQVPQGLTLSLLARQLIPPLNIAYAAFCSSVIYVIFGSCHQMSIGSFFLVSALLINVLKVSPFNNGQLVMGSFVKNEFSAPSYLMGYNKSLSVVATTTFLTGIIQLIMGVLGLGFIATYLPESAMSAYLAAVALHIMLSQLTFIFGIMISFHAGPISFFYDIINYCVALPKANSTSILVFLTVVVALRINKCIRISFNQYPIEFPMELFLCLRSRPERKGPRPRRTKPKGTTWPRGSSEGRSPATMWKRAAVAERQAWVLAAPGLLERAVGGGPEPARFLLPVTPDFSLLPKIILQAFSLSLVSSFLLIFLGKKIASLHNYSVNSNQDLIAIGLCNVVSSFFRSCVFTGAIARTIIQDKSGGRQQIKLQQANLRGVPSQLCRVTKCQRAIGIETGVARGMSQHSDARETVAEVKDKLLLQKHSKRKIDMLLTKQKASVADRDQYVPDGFSPTGSVSSVCISGRRRCDAAPDGEDGTLFLHTAKCRITAGAHSSLEHKTGGQKGETARNKRWRIECDERRTQERQRNMKGDNFWSQIPEELRGDGAKILLLGQIPNTNIYRSINDYREVDMVKVPLKEEEIFSLFNSSDTNLQGGKICRCFCNCDDLEPLPRILYTERFENKLDPEASSINLIHCSHFESMNTSQTASEDQVPYTVSSVSQKNQGQQYEEVEEVWLPNNSSRNSFTRDCLDVGGKQGGGRSLIPYSDASLLAQCPHHHPGFLHGTLRGFHGG

SEQ ID NO: 11950 - protein, 34 aa, Homo sapiens
APKRCKQPKCLSTNEQVNKTWPVHTTEYYSSKKN

SEQ ID NO: 11951 - protein, 82 aa, Homo sapiens
SISKRGLMEEKGSLYEEMGPSSAHSLVSLLAPGSGFCGRLTSQKRGVGQSSPPRSKSKQKQARARREDKSLFFLFFTYANHL

SEQ ID NO: 11952 - protein, 37 aa, Homo sapiens
LCTKHTYTHTHTHTHTHTHTHTHTVTPLSAQRCHSLL

SEQ ID NO: 11953 - protein, 155 aa, Homo sapiens
SRTFPALCLSPVVSSLYSWQHQLTAPSSPLGAEDLLSDSSEPPGLNQVSSEVTSQLYASLRLSRQAEATARAQLYLPSTSPPHEGLDGFAQELSRSLSVGLEKNLKKKDGSKHIFEMESVRGQLQTMLQTSRDTAYREGSSHSWRWLRETGRGLL

SEQ ID NO: 11954 - protein, 860 aa, Homo sapiens
MKTEVGTGLGEDDMFPFRQVELWKMAVKGKEQEKTSDVKSIKASISVHSPQKSTKNHALLEAAGPSHVAINAISANMDSFSSSRTATLKKQPSHMEAAHFGDLGRSCLDYQTQETKSSLSKTLEQVLHDTIVLPYFIQFMELRRMEHLVKFWLEAESFHSTTWSRIRAHSLNTVKQSSLAEPVSPSKKHETTASFLTDSLDKRLEDSGSAQLFMTHSEGIDLNNRTNSTQNHLLLSQECDSAHSLRLEMARAGTHQVSMETQESSSTLTVASRNSPASPLKELSGKLMKKSQGFRFPILQHTSCSYVNLCGHDFFFLGLQFLLSESRILGAAVIAAVAALMLPGSRRRERNKTKQPRGFPPLSLIRIEQDAVNTFTKYISPDAAKPIPITEAMRNDIIAGPAGGYANRHRPPDGLAGSPAPVHEVGGTETSGVGSPVRLKAARICGEDGQVDPNCFVLAQSIVFSAMEQEHFSEFLRSHHFCKYQIEVLTSGTVYLADILFCESALFYFSEYMEKEDAVNILQFWLAADNFQSQLAAKKGQYDGQEAQNDAMILYDKYFSLQATHPLGFDDVVRLEIESNICREGGPLPNCFTTPLRQAWTTMEKVTQNFKRIKLQEVLLVELIKYKVGKPSRIAQWKLKQSSKVIKSRGLESGLKTVNCKTASDRSFRRFPEGGIVIKGDDGSMRVTAPEDLPVGQDVESSVKKASIKILKNFDEAIIVDAASLDPESLYQRTYAGKMTFGRVSDLGQFIRESEPEPDVRKSKGSMFSQAMKKWVQGNTDEAQEELAWKIAKMIVSDIMQQAQYDQPLEKSTKDSKRLTHCTSAQLASASGSHSHQQDCPVGEHTPLTTWRQRFLNAHD

SEQ ID NO: 11955 - protein, 74 aa, Homo sapiens
YKQGKYQTLIKPSDLVKLTHYLKNSMGETALMIQLPPPGPALGTWGLWDLQFKMFTASVYMCLPVFTCLPSTKH

SEQ ID NO: 11956 - protein, 192 aa, Homo sapiens
  DOMAIN (151)..(184): PROLINE-RICH PROTEIN 3 domain identified by eMATRIX, accession number DM00215, p-value=3.898e-09, raw score of 19.43
MGETALMIQLPPPGPALGTWGLWDLQFKTNTTSTDTDPRSHLQETGDNILTLFTMHPPLESEWTICNFRQIWLLSSWSTLETRAQPLHSYFRKLKGRGTAIAGIVFGIVFIMGVIAGIAICICMCMKNHRATRVGILRTTHINTVSSYPGPPPYGHDHEMEYCADLPPPYSPTPQGPAQRSPPPPYPGNARK

SEQ ID NO: 11957 - protein, 128 aa, Homo sapiens; identical to SEQ ID NO: 8326
  DOMAIN (95)..(108): VERTEBRATE METALLOTHIONEIN SIGNATURE domain identified by eMATRIX, accession number PR00860A, p-value=9.000e-17, raw score of 5.46
  DOMAIN (91)..(128): Metallothionein domain identified by PFam, accession name metalthio, E-value=0.012, PFam score of 20.8

SEQ ID NO: 11958 - protein, 124 aa, Homo sapiens
  DOMAIN (101)..(111): VERTEBRATE METALLOTHIONEIN SIGNATURE domain identified by eMATRIX, accession number PR00860C, p-value=1.474e-14, raw score of 9.61
  DOMAIN (11)..(124): Metallothionein domain identified by PFam, accession name metalthio, E-value=7.5e-09, PFam score of 42.8
  misc_feature (1)...(124): Xaa = X or * as defined in Table 2
SGTPASPCLEMDPNCSCSPVGSCACAGSCKCKECKCTSCKKSECRAFPANLGDGPSXSREPRALQAGAGQXPASPNPSFNTXFRIRPQIALKMGCCSCCPVGLCAKCAQGCICKGTSDKCSCCA

SEQ ID NO: 11959 - protein, 227 aa, Homo sapiens
  DOMAIN (85)..(186): Apoptosis regulator proteins, Bcl-2 family domain identified by PFam, accession name Bcl-2, E-value=1.3e-39, PFam score of 145.0
ALVPAGAAPPTRVAAMEVLRRSSVFAAEIMDAFDRSPTDKELVAQAKALGREYVHARLLRAGLSWSAPERAAPVPGRLAEVCAVLLRLGDELEMIRPSVYRNVARQLHISLQSEPVVTDAFLAVAGHIFSAGITWGKVVSLYAVAAGLAVDCVRQAQPAMVHALVDCLGEFVRKTLATWLRRRGGWTDVLKCVVSTDPGLRSHWLVAALCSFGRFLKAAFFVLLPER

SEQ ID NO: 11960 - protein, 215 aa, Homo sapiens
  DOMAIN (182)..(192): ENDOTHELIN SIGNATURE domain identified by eMATRIX, accession number PR00365A, p-value=6.400e-09, raw score of 7.31
DPPNLYLDFDGDVTKLETFGVTTTKASKPRSPASTSTVTNVTDAPTAPKAGTTPVAPSAPDISANSRSLSQILIEQSQKEKQLVTGMDGGPKECKNKDDQGFESCGKKVSNTDKSSRQDSDLKTSDALQLENSQEIETANKYDMTIDMVHVDAERPNVLENLDNSKEKTVTSEAAKTEDTVLCSSDTDKECLIIDTECKNNSDGKTAVMGSNLNS

SEQ ID NO: 11961 - protein, 41 aa, Homo sapiens
GTSLLLPYHIHHGRIPCTFPPKSLDTTTQQKVRSFLKLKVH

SEQ ID NO: 11962 - protein, 229 aa, Homo sapiens
YMEKEDAVNILQFWLAADNFQSQLAAKKGQYDGQEAQNDAMILYDNAAQVSAPRLRGPGARQRAAGLGQPQPRARADSHAERPERKLGKLPRGARVSEARPGPCRSWPGLPPAAGCLAKRPRRCRARGAVTVTVRAQSRTRALRQYFSLQATHPLGFDDVVRLEIESNICREGGPLPNCFTTPLRQAWTTMEKVTQNFKRIKLQEVLLVELIKYKELPNSVFLVMEILA

SEQ ID NO: 11963 - protein, 239 aa, Homo sapiens
PNAEKLVSRYHPQIALTSQSLFTLLNNHGPTYKEQWEIPVCIQVIPVAGSKPVKVIYINSPLPQKKMTMRERNQIFHEVPLKFMMSKNTSVPVSAVFMDKPEEFISEMDMSCEVNECRKIESLENLYLDFDDDVTELETFGVTTTKVSKSPSPASTSTVPNMTDAPTAPKAGTTTVAPSAPDISANSRSLSQILMEQLQKEKQLVTGMDGGPEECKNKDDQGFESCEKVSNSEQAFDTR

SEQ ID NO: 11964 - protein, 55 aa, Homo sapiens
  DOMAIN (31)..(44): VERTEBRATE METALLOTHIONEIN SIGNATURE domain identified by eMATRIX, accession number PR00860A, p-value=9.000e-17, raw score of 5.46
LVNTPSTCALLSLHYRLRSPALPRLEMDPNCSCTTGGSCTCAGSSCQVTLFHLQE

SEQ ID NO: 11965 - protein, 74 aa, Homo sapiens
  misc_feature (1)...(74): Xaa = X or * as defined in Table 2
AHLPEFLLSPCPSLGGPRPRSHCRWXHCPRLRAAPPPAXSALCLGGCCECVAAPGRWYCWVPGDRACSPHTCAR

SEQ ID NO: 11966 - protein, 59 aa, Homo sapiens
  DOMAIN (31)..(44): VERTEBRATE METALLOTHIONEIN SIGNATURE domain identified by eMATRIX, accession number PR00860A, p-value=9.000e-17, raw score of 5.46
LVNTPSTCALLSLHYRLRSPALPRLEMDPNCSCTTGGSCTCAGSTHSRADGSQQAMLRH

SEQ ID NO: 11967 - protein, 470 aa, Homo sapiens
  DOMAIN (260)..(450): Transposase domain identified by PFam, accession name Transposase_15, E-value=7.4e-90, PFam score of 311.9
TRATRWKRTKRYTLRKTERWSPRVIMDSASRHAPGNGLYVNYGLKALNIHGGQKLTLAEHGGAYGATADMSAKIGGEGDLAINTVRQVSLSNGQNDYQGATYVQMGTLRTDADGALGNTRELNISNAAIVDLNGSTQTVETFTGQMGSTVLFKEGALTVNKGGISQGELTGGGNLNVTGGTLAIEGLNARYNALTSISPNAEVSLDNTQGEFSSKRRQTRKEIFLSRMEQILPWQNMVEVIEPFYPKAGNGRRPYPLETMLRIHCMQHWYNLSDGAMEDALYEIASMRLFARLSLDSALPDRTTIMNFRHLLEQHQLARQLFKTINRWLAEAGVMMTQGTLVDATIIEAPSSTKNKEQQRDPEMHQTKKGHQWPLWHEGPHCLVTTAANEHDLNQLGNLLHGEEQFVSADAGYQGAPQREELAEVDVDWLIAERPGKVPARHRLSAHGCVLYTALSRRIVALPLPVSAPP

SEQ ID NO: 11968 - protein, 110 aa, Homo sapiens
RAEARAPGDWGKEQDDEQVQMSYPPVRLTCWLRVLSPQHQPHGFPLHGLMCGNHWLTSSRLPCSVPPRTRYAPPLPPSVQNGAVPPDGHHPPSWHRENHSAYRVENLHTR

SEQ ID NO: 11969 - protein, 45 aa, Homo sapiens
  misc_feature (1)...(45): Xaa = X or * as defined in Table 2
KTITNWRCYSRWPTCFGRTKXYDWHRQMTPPRQRAVLWTKSPKTV

SEQ ID NO: 11970 - protein, 624 aa, Homo sapiens
  DOMAIN (34)..(45): w MINOR ALLERGEN 118 YMR221C. domain identified by eMATRIX, accession number DM00894D, p-value=1.474e-12, raw score of 10.59
  DOMAIN (152)..(336): Transposase domain identified by PFam, accession name Transposase_15, E-value=7.8e-85, PFam score of 295.2
MVIVPIGYAAQELFDVSQVRGGTPYGATTIAGGDGSRQPSQEELSIARYQGEYVAGVRYRSTFYPGISALSVLSHILVLYCTAGLHIGAAIVPTRYAYCNSEFSSKRRQIRKEIFLSRMEQILPWQNMVEVIEPFYPKAGNGRRPYPLETMLRIHCMQHWYNLSDGAMEDALYEIASMRLFARLSLDSALPDRTTIMNFRHLLEQHQLARQLFKTINRWLAEAGVMMTQGTLMHQTKKGNQWHFGMKAHIGVDAKSGLTHSLVTTAANEHDLNQLGNLLHGEEQFVSADAGYQGAPQREELAEVDVDWLIAERPGKRSASCIQKLNTTMIYVTHDQTEAMTMATRIVIMKDGIVQQAEERNDWHFTIGAMYEIENVEGYGEDLDGLADPSVYFNAANGPCRIALGYYHEGPENITRAPEEMRSFLLDAGAEYNGYAADLTRTWSAKMTNDYAQLVKDVNDEQLALIATMKAGVSYVDYHIQFHQRIAKLLRKHQIITDMSEEAMVENDLTGPFMPHGIGHPLGLQVHDVAGFMQDDSGTHLAAPAKYPYLRCTRILQPGMVLTIEPGIYFIESLLAPWREGQFSKHFNWQKIEALKPFGGIRIEDNVVIHENNVENMTRDLKLA

SEQ ID NO: 11971 - protein, 59 aa, Homo sapiens
QVTGHRFRGAYQHTACSFTEDGFHRLRFSFIASRRRSTVRVNVANLTRFNACITQSICH

SEQ ID NO: 11972 - protein, 20 aa, Homo sapiens
KTITNWRCYSRWPTCFGRTK

SEQ ID NO: 11973 - protein, 133 aa, Homo sapiens
EKSVYSLIFPCVFFLPSTWEKEDAVNILQFWLAADNFQSQLAAKKGQYDGQEAQNDAMILYDKYFSLQATHPLGFDRCCTIKKIESNICREGGPLPNCFTTPLRQAWTTMEKVTQNFKRIKLQEVLLVELNKI

SEQ ID NO: 11974 - protein, 91 aa, Homo sapiens
KLSCPDPQSEEKLQGKREGQIRETGEEGGAAKEAAVPPQSSSDSAPGATQLRRQRQCCSSSEGQQAGRQTEVLGLEGLSPQPLGWAWPNGL

SEQ ID NO: 11975 - protein, 139 aa, Homo sapiens
RWLIVTLFIGEDLNTQITVYIREQGQFKVINRTGCQGMGLRLNIRNIQLVIKYLDIEYRTKQRFITCRSPAVTDNLFGIVTLMTTHFFQLCCQSGCQFRQRFLRRNVNTQRQNVEHGSGSRQRRRAQSTHKDKSGGVVH

SEQ ID NO: 11976 - protein, 97 aa, Homo sapiens
  misc_feature (1)...(97): Xaa = X or * as defined in Table 2
LLHRFCRWPALAPGAILRQIPKKQQRVGLHYSPMSYVSWRYRVCHWTITVFCLSKTLATSYARPASISVKNTKWRCFPLPKVKTNHXNIRICLPPPR

SEQ ID NO: 11977 - protein, 45 aa, Homo sapiens
GPSTAISPSRVLLVAAHLVPRCLHFLGGGSALVADPAANFSFWCS

SEQ ID NO: 11978 - protein, 141 aa, Homo sapiens
  DOMAIN (43)..(70): Protamine P1 proteins domain identified by eMATRIX, accession number BL00048, p-value=5.613e-09, raw score of 6.39
  misc_feature (1)...(141): Xaa = X or * as defined in Table 2
WRRRDRCASHHFAVSVTTIGSSRDPDAGSLPVHSWRRKERRSALYLHRSSRSHRRTYPRRDRRRAFWFVQPRCWLAAILSGHXTGGCTXNIRSHQLGTSQLTLRCVQNHRCRRCRSSDRPRLRVLSWHARKYQTPGRCSER

SEQ ID NO: 11979 - protein, 933 aa, Homo sapiens
  DOMAIN (271)..(290): Domain of unknown function domain identified by eMATRIX, accession number PF00990B, p-value=7.900e-16, raw score of 12.15
  DOMAIN (393)..(589): Transposase domain identified by PFam, accession name Transposase_15, E-value=3.6e-112, PFam score of 386.1
MTQIFTGTLVEADPFHAVTLVANHDTQPLQALEAPVEPWFKPLAYALILLRENGVPSVFYPDLYGAHYEDVGGAGQTYPIDMPIIEQLDELILARQRFAHGVQTLFFDHPNCIAFSRSGTDEFPGCVVVMSNGDDGEKTIHLGENYGNKTWRDFLGNRQERVVTDENGEATFFCNGGSVSVWVIEEAANNRQYDYGAGHKIPVINYTDVHLRIERSCRFRADPRQQHELQLSSKLAVHDVLTNIYNRRYFFNSVESLLSRPVVKDFCVMLVDINQFKRINAQWGHRVGDKVLVSIVDIIQQSIRPDDILARLEGEVFGLLFTELNSAQAKIIAERMRKNVELLTGFSNRYDVPEQMTISIGTVFSTGDTRNISLVMTEADKALREAKSEGGNKHWYNLSDGAMEDALYEIASMRLFARLSLDSALPDRTTIMNFRHLLEQHQLARQLFKTINRWLAEAGVMMTQGTLVDATIIEAPSSTKNKEQQRDPEMHQTKKGNQWHFGMKAHIGVDAKSGLTHSLVTTAANEHDLNQLGNLLHGEEQFVSADAGYQGAPQREELAEVDVDWLIAERPGKVRTLKQHPRKNKTAINIEYMKASIRARVEHPFRIIKRQFGFVKARYKGLLKNDNQLAMLFTLANLFRADQMIHSQYSALRRHQDGSVSFKPETHTCDAHRPALKPANDYVRTFFRGVDISQVFSAKDIARRTPNGLIRKTPGFGPRSALKLLQDEDREYGYVIERGNKFVGAVSIDSLKTAAVPPVQLLTGWCVTAKAPPDISAISALTAVKHGNCSSLTPLLNPPGSDVIVCAEMDEQWGYVGAKSRQRWLFYAYDSLRKTVVAHVFGERTMATLGRLMSLLSPFDVVIWMTDGWPLYESRLKGKLHVISKRYTQRIERHNLNLRQHLARLGRKSLSFSKSVELHDKVIGHYLNIKHYQ

SEQ ID NO: 11980 - protein, 129 aa, Homo sapiens
  misc_feature (1)...(129): Xaa = X or * as defined in Table 2
VSSDQNRRFCNRCYGRLQPGGCFSLWCQFSASKSYLSPSDLXXWXQLSPSASRLPLASLTISSSLSCAGSASFHSRHIPGRCTCRYLRVFGVAFWAVWXXHVDFLKSQQGKSAKKRQIAEKGRNYTQNP

SEQ ID NO: 11981 - protein, 774 aa, Homo sapiens
  DOMAIN (667)..(719): ELEMENT TRANSPOSABLE INSERTION PROTEIN TRANSPOSITION DNA domain identified by eMATRIX, accession number PD02455C, p-value= 5.253e-11, raw score of 29.23
  DOMAIN (276)..(478): Transposase domain identified by PFam, accession name Transposase_15, E-value=3e-112, PFam score of 386.3
MNLMEQPAKDQYLSTQGLPVLVNSLARYPQEALPITNYFAASELAPAVARAFNKLKTLRENARSWLLKYPEHALTGLLPAALGKAGEAQDNARAALRMLTENGHQPLLQEIARRYNQPEVTDAVNALLALDPLDNHPTKIPTLPAFYQPSLWTRPVLKANAQSLPDSALLHLGEMLRFPQEEALYPGLLQVKDVCSADSLAGFAWDLFTAWQTAGAPSKESWAFTAEFSSKRRQTRKEIFLSRMEQILPWQNMVEVIEPFYPKAGNGRRPYPLETMLRIHCMQHWYNLSDGAMEDALYEIASMRLFARLSLDSALPDRTTIMNFRHLLEQHQLARQLFKTINRWLAEAGVMMTQGTLVDATIIEAPSSTKNKEQQRDPEMHQTKKGNQWHFGMKAHIGVDAKSGLTHSLVTTAANEHDLNQLGNLLHGEKQFVSAMPATKEPQREELAEVDVDLLIAERPGKVKTLKQNPRKNKTAINIEYMKASIRARVEHPFRIIKRQFGFVKARYKGLLKNDNQLAMLFTLANLFRVDQMIQLPTYELSSGIGAVRRQAELDGTPAINSKRVYRIMRQNALLLERKPAVPPSKRAHTGRVAVKESNQRWCSDGFEFCCDNGERLRVTFALDCCDREALHWAVTTGGFNSETVQDVMLGAVERRFGNDLPSSPVEWLTDNGSCYRANETRQFARMLGLEPKNTAVRSPESNGIAESFVKTIKRDYISIMPKPDGLTAAKNLAEAFEHYNEWHPHSALGYRSPREYLRQRACNGLSDNRCLEI

SEQ ID NO: 11982 - protein, 39 aa, Homo sapiens
GLLLGTGPERKPEQKMCLLVHWLLTSGGLPGLPSGTPRC

SEQ ID NO: 11983 - protein, 69 aa, Homo sapiens
  misc_feature (1)...(69): Xaa = X or * as defined in Table 2
VCHAAPPILRTTATSVPAVPGAASDSGYAAQFAAYIACXLRAAFPSGGIHTAASHPSSISPRQRVTAGS

SEQ ID NO: 11984 - protein, 40 aa, Homo sapiens
SKSRPIASNKIEAIIKSLPAKKPGPDGFATEFYQTFKEEL

SEQ ID NO: 11985 - protein, 90 aa, Homo sapiens
LSCPDPQSEEKLQGKREGQIRETGEEGGAAKEAAVPPQSSSDSAPGATQLRRQRQCCSSSEGQQAGRQTEVLGLEGLSPQPLGWAWPNGL

SEQ ID NO: 11986 - protein, 62 aa, Homo sapiens
  misc_feature (1)...(62): Xaa = X or * as defined in Table 2
KTITNWRCYSRWPTCFGRTKXYHWHQLLSMVRQLMVLSWKKISSWFMGPPIIRKSILAENSI

SEQ ID NO: 11987 - protein, 681 aa, Homo sapiens
  DOMAIN (432)..(448): Putative AMP-binding domain proteins domain identified by eMATRIX, accession number BL00455, p-value=8.500e-11, raw score of 13.31
  DOMAIN (1)..(241): chorismate binding enzyme domain identified by PFam, accession name chorismate_bind, E-value=1.1e-104, PFam score of 361.2
MVARAAALTATPQVDKVVLSRLIDITTDAAIDSGVLLERLIAQNPVSYNFHVPLADGGVLLGASPELLLRKDGERFSSIPLAGSARRQPDEVLDREAGNRLLASEKDRHEHELVTQAMKEVLRERSSELHVPSSPQLITTPTLWHLATPFEGKANSQENALTLACLLHPTPALSGFPHQAATQVIAELEPFDRELFGGIVGWCDSEGNGEWVVTIRCAKLRENQVRLFAGAGIVPASSPLGARMSIPFTRWPEEFARRYREKGYWQDLPLTDILTRHAASDSIAVIDGERQLSYRELNQAADNLACSLRRQGIKPGETALVQLGNVAELYITFFALLKLGVAPVLALFSHQRSELNAYASQIEPALLIADRQHALFSGDDFLNTFVTEHSSIRVVQLLNDSGEHNLQDAINHPAEDFTATPSPADEVAYFQLSGGTTGTPKLIPRTHNDYYYSVRRSVEICQFTQQTRYLCAIPAAHNYAMSSPGSLGVFLAGGTVVLAADPSATLCFPLIEKHQVNVTALVPPAVSLWLQALIEGESRAQLASLKLLQVGGARLSATLAARIPAEIGCQLQQVFGMAEGLVNYTHESSTYLRRHEFSSKRRQTRKEIFLSRMEQILPWQNMVEVIEPFYPKAGNGRRPYPLETMLRIHCMQHWYNLSDGAMEDALYEIACHASVCPVIPG

SEQ ID NO: 11988 - protein, 96 aa, Homo sapiens
  misc_feature (1)...(96): Xaa = X or * as defined in Table 2
PEGAPRTPGPLPRAPGRTSEGAGRRGGPLGPVVTMCLPRRQLSYPDVGXAEGGLPALDPWPGHARGSEGPRRQGGAVLAVRLGGRVYVHLHTPGGQ

SEQ ID NO: 11989 - protein, 47 aa, Homo sapiens
RALPIDEREHQPEGPMVVHCSDCILHPPLASGRCVTSRASLRPKKLV

SEQ ID NO: 11990 - protein, 749 aa, Homo sapiens
  DOMAIN (120)..(172): emp24/gp25L/p24 family domain identified by eMATRIX, accession number PF01105B, p-value=9.321e-25, raw score of 25.12
  DOMAIN (206)..(420): DEAD/DEAH box helicase domain identified by PFam, accession name DEAD, E-value=8.6e-57, PFam score of 182.5
  misc_feature (1)...(749): Xaa = X or * as defined in Table 2
MAGVGAGPLRAMGRQALLLLALSHRRQGLYFHIGETEKRCFIEEIPDETMVIGNYRTQMWDKQKEVFLPSTPGLGMHVEVKDPDGKVVLSRQYGSEGRFTFTSHTPGDHQICLHSNSTRMALFAGGKLYREERFRLTSESTNQRVLWWSIAQTVILILTGIWQMRHLKSFFEAKKLRVRAALLSSAMEDSEALGFEHMGLDPRLLQAVTDLGWSRPTLIQEKAIPLALEGKDLLARARTGSGKTAAYAIPMLQLLLHRKATGPVVEQAVRGLVLVPTKELARQAQSMIQQLATYCARDVRVANVSAAEDSVSQRAVLMEKPDVVVGTPSRILSHLQQDSLKLRDSLELLVVDEADLLFSFGFEEELKSLLCHLPRIYQAFLMSATFNEDVQALKELILHNPVTLKLQESQLPGPDQLQQFQVVCETEEDKFLLLYALLKLSLIRGKSLLFVNTLERSYRLRLFLEQFSIPTCVLNGELPLRSRCHIISQFNQGFYDCVIATDAEVLGAPVKGKRGAEGPKGDKASDPEAGVARGIDFHHVSAVLNFDLPPTPEAYIHRAGRXXCDGPGICMTARANNPGIVLTFVLPTEQFHLGKIEELLSGENRGPILLPYQFRMEEIEGFRYRCRDAMRSVTKQAIREARLKEIKEELLHSEKLKTYFEDNPRDLQLLRHDLPLHPAVVKPHLGHVPDYLESKVPEPTAQLQAQRKEIQTHSQALLRLLGLSGAEHIVEHRLTPFVDRRGSGAYCTA

SEQ ID NO: 11991 - protein, 772 aa, Homo sapiens
  DOMAIN (160)..(212): emp24/gp25L/p24 family domain identified by eMATRIX, accession number PF01105B, p-value=4.638e-29, raw score of 25.12
  DOMAIN (13)..(217): emp24/gp25L/p24 family domain identified by PFam, accession name EMP24_GP25L, E-value=2.6e-70, PFam score of 247.0
FVSGLGLCGRWGGRLLLLLALCATGAQGLYFHIGETEKRCFIEEIPDETMVIGNYRTQMWDKQKEVFLPSTPGLGMHVEVKDPDGKMLQVVLSRQYGSEGRFTFTSHTPGDHQICLHSNSTRMALFAGGKLRVHLDIQVGEHANNYPEIAAKDKLTELQLRARQLLDQYREERFRLTSESTNQRVLWWSIAQTVILILTGIWQMRHLKSFFEAKKLRVRAALLSSAMEDSEALGFEHMGLDPRLLQAVTDLGWSRPTLIQEKAIPLALEGKDLLARARTGSGKTAAYAIPMLQLLLHRKATGPVVEQAVRGLVLVPTKELARQAQSMIQQLATYCARDVRVANVSAAEDSVSQRAVLMEKPDVVVGTPSRILSHLQQDSLKLRDSLELLVVDEADLLFSFGFEEELKSLLCHLPRIYQAFLMSATFNEDVQALKELILHNPVTLKLQESQLPGPDQLQQFQVVCETEEDKFLLLYALLKLSLIRGKSLLFVNTLERSYRLRLFLEQFSIPTCVLNGELPLRSRCHIISQFNQGFYDCVIATDAEVLGAPVKGKRRGRGPKGTSVARGIDFHHVSAVLNFDLPPTPEAYIHRAGRTARANNPGIVLTFVLPTEQFHLGKIEELLSGENRGPILLPYQFRMEEIEGFRYRCRDAMRSVTKQAIREARLKEIKEELLHSEKLKTYFEDNPRDLQLLRHDLPLHPAVVKPHLGHVPDYLESKVPEPTAQLQAQRKEIQTHSQALLRLLGLSGAEHIVEHRLTPFVDRRGSGAYCTA

SEQ ID NO: 11992 - protein, 94 aa, Homo sapiens
QPPQEGTAEAGKPSLCVFISTFPGIWGGLLFLRFQVQHCIRTEAVTEDSVPRKGASCVSLGFGALLKKPTTPITPYCSPSTPPHSSMKMCEPPV

SEQ ID NO: 11993 - protein, 151 aa, Homo sapiens
SFKLSKVEQFQEGGPSKRMPWVIHVFPWVHFQLCIPALQLCSQPRANTLHPNLRWGGKGQSPIWDPSIEGQPGLLPAGCLCYTCRMCTMFSLDNTPSFLPHQPQTSRPFPPFLPVAEPPTIAHTVLVQLLTVPGLRSVMLAFPQQERKPAG

SEQ ID NO: 11994 - protein, 93 aa, Homo sapiens
AASRGDGGALAGARVAEAAAVGRGECPFPGRRQSGPEPAAQGGELRAEMAADAAHPHGGPRLPTGGPRAADEAGRASTGCGISKPLPSVFSHL

SEQ ID NO: 11995 - protein, 115 aa, Homo sapiens
SETPQAPTLPTQGSLLEGEERMEDIRTLTVALFTLICCPGSDEKVFEVHVRPKKLAVEPKGSLEVNCSTTCNQPEVGGLETSLDKVFAGTEQAQWKHLLGSSNLSPDTVLHCHFH

SEQ ID NO: 11996 - protein, 145 aa, Homo sapiens
AAASGGEWRGSGWGSCVAEAAAVGRGECRFPGRRQSGPEPAAEGGELRAEMAADAAHPHGGPRLPTGGPRAADEAGRARVRAGAPPGAQRGPHSRSHPPISQESLCLWRWPKEEEEPVTLWKNALPVLVVCPLAPADTAKCPIPK

SEQ ID NO: 11997 - protein, 35 aa, Homo sapiens
EIGWVQWLMPVIPAVWEAEVGGLLEPRSLRAARAI

SEQ ID NO: 11998 - protein, 36 aa, Homo sapiens
VKQKPRIVAHVLAYSVYTHTQTHKHTHTQCHTGSDP

SEQ ID NO: 11999 - protein, 334 aa, Homo sapiens
  DOMAIN (22)..(42): BETA-3 ADRENERGIC RECEPTOR SIGNATURE domain identified by eMATRIX, accession number PR00563B, p-value=1.750e-24, raw score of 3.98
  DOMAIN (54)..(274): 7 transmembrane receptor (rhodopsin family) domain identified by PFam, accession name 7tm_1, E-value=2.5e-65, PFam score of 209.7
MAPWPHENSSLAPWPDLPTLAPNTANTSGLPGVPWEAALAGALLALAVLATVGGNLLVIVAIAWTPRLQTMTNVFVTSLAAADLVMGLLVVPPAATLALTGHWPLGATGCELWTSVDVLCVTASIETLCALAVDRYLAVTNPLRYGALVTKRCARTAVVLVWVVSAAVSFAPIMSQWWRVGADAEAQRCHSNPRCCAFASNMPYVLLSSSVSFYLPLLVMLFVYARVFVVATRQLRLLRGELGRFPPEESPPAPSRSLAPAPGYANSAFNPLIYCRSPDFRSAFRRLLCRCGRRLPPEPCAAARPALFPSGVPAARSSPAQPRLCQRLDGERHL

SEQ ID NO: 12000 - protein, 426 aa, Homo sapiens
  DOMAIN (282)..(303): BETA-3 ADRENERGIC RECEPTOR SIGNATURE domain identified by eMATRIX, accession number PR00563F, p-value=1.000e-24, raw score of 7.47
  DOMAIN (72)..(364): 7 transmembrane receptor (rhodopsin family) domain identified by PFam, accession name 7tm_1, E-value=1.6e-89, PFam score of 286.5
FGRPPPSFFPYRPTRDPGMAPWPHENSSLAPWPDLPTLAPNTANTSGLPGVPWEAALAGALLALAVLATVGGNLLVIVAIAWTPRLQTMTNVFVTSLAAADLVMGLLVVPPAATLALTGHWPLGATGCELWTSVDVLCVTASIETLCALAVDRYLAVTNPLRYGALVTKRCARTAVVLVWVVSAAVSFAPIMSQWWRVGADAEAQRCHSNPRCCAFASNMPYVLLSSSVSFYLPLLVMLFVYARVFVVATRQLRLLRGELGRFPPEESPPAPSRSLAPAPVGTCAPPEGVPACGRRPARLLPLREHRALCTLGLIMGTFTLCWLPFFLANVLRALGGPSLVPGPAFLALNWLGYANSAFNPLIYCRSPDFRSAFRRLLCRCGRRLPPEPCAAARPALFPSGVPAARSSPAQPRLCQRLDGASWGVS

SEQ ID NO: 12001 - protein, 131 aa, Homo sapiens
IGQVRWLTLVILALWEVEVGGSPKVTSSRPQLITHLGLPKCWDYSLEPLCPTCLFFEIQSCSITQVECSGTITAHCSLQLLGSSDSPASASQVAGTTGALHAWLIFKFIVEKGSHFAAQACQTFSYKKLHA

SEQ ID NO: 12002 - protein, 216 aa, Homo sapiens
  DOMAIN (133)..(182): Thymidylate synthase proteins domain identified by eMATRIX, accession number BL00091E, p-value=9.813e-32, raw score of 22.23
  DOMAIN (112)..(216): Thymidylate synthase domain identified by PFam, accession name thymidylat_synt, E-value=1.3e-68, PFam score of 241.4
MVMEMEMVMVMVMEMVMVMVMEMVMVMEMVMVMVMEMVMVMVMEMVMVMEMVMVMVMEMVMVMVMVMVMVMEMEMVMVMEMVMVMEMEMVMVMEMVMVMVMVWRCDGYGDGDDLPLMALPPCHALCQFYVVNSELSCQLYQRSGDMGLGVPFNIASYALLTYMIAHITGLKLQREPRPFPKLRILRKVEKIDDFKAEDFQIEGYNPHPTIKMEMAV

SEQ ID NO: 12003 - protein, 349 aa, Homo sapiens
  DOMAIN (190)..(239): Thymidylate synthase proteins domain identified by eMATRIX, accession number BL00091D, p-value=1.000e-40, raw score of 23.61
  DOMAIN (63)..(349): Thymidylate synthase domain identified by PFam, accession name thymidylat_synt, E-value=8.1e-219, PFam score of 740.3
  misc_feature (1)...(349): Xaa = X or * as defined in Table 2
GGGGTTWPASVPPRHLACLRPAAPLRLPPSPARRAMPVAGSELPRRPLPPAAQERDAEPRPPHGELQYLGQIQHILRCGVRKDDRTGTGTLSVFGMQARYSLRDEFPLLTTKRVFWKGVLEELLWFIKGSTNAKELSSKGVKIWDANGSRDFLDSLGFSTREEGDLGPVYGFQWRHFGAEYRDMESDYSGQGVDQLQRVIDTIKTNPDDRRIIMCAWNPRDLPLMALPPCHALCQFYVVNSELSCQLYQRSGDMGLGVPFNIASYALLTYMIAHITGLKPGDFIHTLGDAHIYLNHIEPLKIQLQREPRPFPKLRILRKSXRKLIDFKAEDFQIEGYNPHPTIKMEMAV

SEQ ID NO: 12004 - protein, 138 aa, Homo sapiens
  DOMAIN (95)..(122): THYMIDYLATE SYNTHASE FAMILY SIGNATURE domain identified by eMATRIX, accession number PR00108D, p-value=3.077e-26, raw score of 15.23
  DOMAIN (73)..(129): Thymidylate synthase domain identified by PFam, accession name thymidylat_synt, E-value=3.6e-32, PFam score of 120.3
NGHLQETLHRWIVSLSSVPSLQRLLWTSLQPSGSLSWSPPYEMASVSLLFYFAFSCGLSNHHPSLSSSGGSSDLPVMALPPCHALCQFYVVNSELSCQLYHRSGDMDLGVPFNIASYALLTYMIAHIHGPEGGLSRER

SEQ ID NO: 12005 - protein, 354 aa, Homo sapiens
  DOMAIN (110)..(162): Surp module domain identified by PFam, accession name Surp, E -value=6.6e-26, PFam score of 99.5
MCPAAALTPTSVASQSEAPWSFMLIRECNTMVTPSLRGEMQTTRLHAATPSSNSDRHVSMPLLLYLEQVTFLQEHAGTGRRWWSIVWRRRTFPAAGAMEMPLPPDDQELRNVIDKLAQFVARNGPEFEKMTMEKQKDNPKFSFLFGGEFYSYYKCKLALEQQQRHSRGSPHLPGLGLRARGNGGGAAATRAHWDDGRATYVYQWPWTLLLLAVSGFCNFAQNVIAFSILNLVSPLSYSVANATKRIMVITVSLIMLRNPVTSTNVLGMMTAILGVFLYNKTKYDANQQARKHLLPVTTADLSSKERHRSPLEKPHNGLLFPPARGLSVRPQQHLNRPLPIQPAELPKLVQFEPL

SEQ ID NO: 12006 - protein, 126 aa, Homo sapiens
HAHLVTLAPISCPGSQSYPSWSPQGTLTVALFTLICWPRSDEKVFEVHVRPKKLADEPKGSLEVNCSTTCHHPEVGGLETSLDKILLDEQAHRKHYLDSNMYHDTVLQCHFTCSGKQEAMNINVSG

SEQ ID NO: 12007 - protein, 68 aa, Homo sapiens
FTKGPPPSKKRFISSINIFDKGFQFGFHRGVPGHDFGNLGPLPPGIKRFLSLSLSNSWECKPASLERP

SEQ ID NO: 12008 - protein, 93 aa, Homo sapiens
LHTVCVVCVCVCMCMCVCVCLKGYSVFTLKIQRSHSFSQNYKGEVKKNSKAPSVYLVYLKEIRVCICSHRAYINAHTHTHTHTHTHPKYISAH

SEQ ID NO: 12009 - protein, 102 aa, Homo sapiens
FSHWIFFPAVRGDLGPVEGHCLNLSGVCRRDVCKVVEDQIGAFWKFLKSPQVSRGDCSCTESHCLDNWPGVVAGVGLNPGVKILELGVFLYLFWDSAPLANI

SEQ ID NO: 12010 - protein, 52 aa, Homo sapiens
FSHWIFFPAVRGDLGPVEGHCLNLSGVCRRDVCKVVEDQIGACRLFFLFSEC

SEQ ID NO: 12011 - protein, 57 aa, Homo sapiens
FSHWIFFPAVRGDLGPVEGHCLNLSGVCRRDVCKVVEDQIGAWGSCRSRPKSRCEDP

SEQ ID NO: 12012 - protein, 95 aa, Homo sapiens
LPHKLIHSNVGKWSRVPGQSAISTGTETPPVQGSSRLDLGLHLQLPQASYPGSDFLYSYSHLWTPAETLKISRRSGIFGDLSYGYVACKGESISF

SEQ ID NO: 12013 - protein, 86 aa, Homo sapiens
SKRWFGSCGRSLSQFVWCLQNRCLQHSRRSNWCLCRQCSHEKGLQKFLTFWKFLKSPQVSRGDCSCTESHCLDNWPAGCFSYFSEC

SEQ ID NO: 12014 - protein, 52 aa, Homo sapiens
  misc_feature (1)...(52): Xaa = X or * as defined in Table 2
MSTTFMGRSQATGGCVQTDTPGPPTLLQDTQQLSVVHPDIQLEVGFPGGGGX

SEQ ID NO: 12015 - protein, 77 aa, Homo sapiens
  DOMAIN (20)..(53): Beta defensins domain identified by eMATRIX, accession number PF00711, p-value=7.400e-09, raw score of 15.76
FSHWIFFPAVRGDLGPVEGHCLNLSGVCRRDVCKVVEDQIGACRRRMKCCRTWWILMPIPTPLIMSDYQEPLKHKLK

SEQ ID NO: 12016 - protein, 207 aa, Homo sapiens
MTVTHITIYNKAQVSILKCRGRVKGCGSAERRSHPNQHVAARTPSDASKTTTAQRNGGGKPRSSTTCSVVSNSVDSSSDVCRSMSVESQSIVAYFLHSQVQAAGYLNPLHLAVKLCQAPGTSNNSDCLRPRRRRCHRQHTPSDHFTCWPSNVQQRIKHPSARTLESAPWPAKSPAIFADGPTGGAACILQALFRAGSTAKAAMVASR

SEQ ID NO: 12017 - protein, 128 aa, Homo sapiens
  DOMAIN (31)..(51): ALPHA-2A ADRENERGIC RECEPTOR SIGNATURE domain identified by eMATRIX, accession number PR00558C, p-value=7.923e-09, raw score of 6.54
  misc_feature (1)...(128): Xaa = X or * as defined in Table 2
NPPNXNPPNACVKPEFENQPKLKWSQRGVGGPRREGPPAQPAPEGTAGRRADKLVRVGWRPPPATSAQGSAHSPPLFCXSSRSRGPSSPCLEAPTPGASPSTXTITPPRRAWRRACWTWPCSCPTPCG

SEQ ID NO: 12018 - protein, 292 aa, Homo sapiens
  DOMAIN (192)..(212): ADHESION GLYCOPROTEIN PRECURSOR I domain identified by eMATRIX, accession number PD02929B, p-value=8.800e-17, raw score of 18.36
  misc_feature (1)...(292): Xaa = X or * as defined in Table 2
RLPEMSSFGYRTLTVALFTLICCPGSDEKVFEVHGEAKGSWAVEPKGSLEVNCSTTCNQPXSGVGLGDLSXDXGFCWDEQVQLWKHYLGFQTFSHDTVLQCHFTCSGKQESMNSNVSALYQPPRQVILDTCNPLLGGFLGKSFHHLKLQGVPTVEPLGQPXPSFLVSVGNETLHYETFGKAAPAPQEATATFNSTADREDGHRNFSCLAVLDLMSRGGNIFHKHSAPKMLEIYEPVSDSQMVIIVTVVSVLLSLFVTSVLLCFIFGQHLRQQRMGTYGVRAAWRRLPQAFRP

SEQ ID NO: 12019 - protein, 39 aa, Homo sapiens
ASDHFELVRWLTPGIPALWEAQEGGLFGPGSSRPTWATF

SEQ ID NO: 12020 - protein, 77 aa, Homo sapiens
  DOMAIN (29)..(72): Alkaline phosphatase proteins domain identified by eMATRIX, accession number BL00123B, p-value=4.441e-31, raw score of 19.31
GMGVSTVTAARILKGQKKDKLGPEIPLAMDRFPYVALSKTYNVDKHVPDSGATATAYLCGVKGNFQTPRPADLCFSP

SEQ ID NO: 12021 - protein, 233 aa, Homo sapiens
  DOMAIN (28)..(71): Alkaline phosphatase proteins domain identified by eMATRIX, accession number BL00123B, p-value=1.000e-40, raw score of 19.31
  DOMAIN (2)..(233): Alkaline phosphatase domain identified by PFam, accession name alk_phosphatase, E-value=1.7e-15, PFam score of 41.7
LGVPTVTATRILKGQKNGKLGPETPLAMDRFPYLALSKTYNVDRQVPDSAATATAYLCGVKANFQTIGLSAAARFNQCNTTRGNEVISVMNRAKQAGKSVGVVTTTRVQHASPAGTYAHTVNRNWYSDADMPASARQEGCQDIATQLISNMDIDVRPPGQGLGLGRGEGGTGSDPGNQKPDLGQQVLEVILGGGRKYMFPMGTPDPEYPADASQNGIRLDGKNLVQEWLAKHQ

SEQ ID NO: 12022 - protein, 539 aa, Homo sapiens
  DOMAIN (152)..(202): Alkaline phosphatase proteins domain identified by eMATRIX, accession number BL00123C, p-value=1.000e-40, raw score of 24.61
  DOMAIN (23)..(494): Alkaline phosphatase domain identified by PFam, accession name alk_phosphatase, E-value=0, PFam score of 1046.2
CPPDMLGPCMLLLLLLLGLRLQLSLGIILVEEENPDFWNREAAEALGAAKKLQPAQTAAKNLIIFLGDGVGVSTVTAARILKGQKKDKLGPEIPLAMDRFPYVALSKTYNVDKHVPDSGATATAYLCGVKGNFQTIGLSAAARFNQCNTTRGNEVISVMNRAKKAGKSVGVVTTTRVQHASPAGTYAHTVNRNWYSDADVPASARQEGCQDIATQLISNMDIDVILGGGRKYMFRMGTPDPEYPDDYSQGGTRLDGKNLVQEWLAKHQGARYVWNRTELMRASLDPSVAHLMGLFEPGDMKYEIHRDSTLDPSLMEMTEAALRLLSRNPRGFFLFVEGGRIDHGHHESRAYRALTETIMFDDAIERAGQLTSEEDTLSLVTADHSHVFSFGGCPLRGGSIFGLAPGKARDRKAYTVLLYGNGPGYVLKDGARPDVTESESGSPEYRQQSAVPLDEETHAGEDVAVFARGPQAHLVHGVQEQTFIAHVMAFAACLEPYTACDLAPPAGTTDAAHPGRSVVPALLPLLAGTLLLLETATAP

SEQ ID NO: 12023 - protein, 47 aa, Homo sapiens
TCLTHTHTHTHTHTHTHTGLLSLVQVCQVCRQNMSESGFVTTDHKPT

SEQ ID NO: 12024 - protein, 75 aa, Homo sapiens
  DOMAIN (30)..(41): PROTEIN SPORULATION REPEAT PRECU domain identified by eMATRIX, accession number PD02283B, p-value=7.857e-09, raw score of 8.67
GHTGPLGSPWSSVWVCLAGRQVPGPQHPHRPPGCSWGCRPPAGTGPRLPSASAPRCCPPRMRLEPRASRRSGTSG

SEQ ID NO: 12025 - protein, 132 aa, Homo sapiens
LLPGSTNKAILQKDGQASHTIMQGTGALTPGPAPPARGPWPLLRWPPQPTAARASEIWHRSGPQHVALIRRESCGSQGAPRGRRPPPRPAVPADHGSARPPGCCLASPRIRQGSPGAHQSASASERGGSSMA

SEQ ID NO: 12026 - protein, 174 aa, Homo sapiens
YARTLCLTCHIFFFFLETDPCSITQARVWWCEHGSLQPRPSGSSDPHASDPQSAGITGESHHAGLNLQGILRLKCHLLNHPCFKSVGGHPVSAADLAWTLGCEREGWAGLEEPEALVMSQAHLAGHPLRCTCPRWPPQQRRATGGWRASTGRSSGGEGRAQAPRRLRRPEPGVR

SEQ ID NO: 12027 - protein, 90 aa, Homo sapiens
ISLHYKEENPPNETDMNIVYGLHTHTHTHTHTHTHTQIYFNPVTTRNLETTYQQRGTERLPFSKMSKKRRVGWEVLVYLDEQGSEMARHE

SEQ ID NO: 12028 - protein, 619 aa, Homo sapiens
MLESKEEDVEVEKWSPLSLHLHTLKGYGQVQEARYSPKVIIEIWKMGVDWSTGLVLKAEQHSFAFGVMETGIRIRKKKTSNESKSGGPSPSQMGGSGNLIGRGRRKGGVKNNCKEPNLRTDPAKKVRQVKWCSWCVLEGESVEIVSEVRVEVGELNIIKDWGRESVEKGGAVISMEAERVKGQAMIATGGVITGLAALKRQDSARSQQHVNLSPSPATQEKKPIRRRPRADVVVVRGKIRLYSPSGFFLILGVLISIIGIAMAVLGYWPQKEHFIDAETTLSTNETQVIRNEGGVVVRFFEQHLHSDKMKMLGPFTMGIGIFIFICANAILHENRDKETKIIHMRDIYSTVIDIHTLRIKEQRQMNGMYTGLMGETEVKQNGSSCASRLAANTIASFSGFRSSFRMDSSVEEDELMLNEGKSSGHLMPPLLSDSSVSVFGLYPPPSKTTDDKTSGSKKCETKSIVSSSISAFTLPVIKLNNCVIDEPSIDNITEDADNLKSRSRNLSMDSLVVPLPNTSESFQPVSTVLPRNNSIGESLSSQYKSSMALGPGAGQLLSSGAARRQFGSNTSLHLLSSHSKSLDLDRGPSTLTVSGRTTETSKLGLGLDREQQAKGIYGN

SEQ ID NO: 12029 - protein, 133 aa, Homo sapiens
  DOMAIN (107)..(132): D-isomer specific 2-hydroxyacid dehydrogenases NAD-binding si domain identified by eMATRIX, accession number BL00065B, p-value= 4.000e-16, raw score of 16.97
  DOMAIN (41)..(133): D-isomer specific 2-hydroxyacid dehydrogen domain identified by PFam, accession name 2-Hacid_DH, E-value=2.5e-12, PFam score of 30.9
SWSGSAAALRMRPVRLMKVFVTRRIPAEGANLKVISTMSVGIDHLALDEIKKRGIRVGYTPDVLTRYHRRTRSLPATYHLPPVAGGHRGSEEWWWTSWKPLWLCGYGLTQSTVGIIGLGRIGQAIARRLKPFG

SEQ ID NO: 12030 - protein, 111 aa, Homo sapiens
PSLHPKASPVSPIKGKEAVSRDEQNNHQGSHFLLPPKIPSWRDPPETLEEPQNAPRERPEGPAAAKKPPRHCELVVTLGCPEIHGDLRPWDRKRQPRSLRGSHLGGQRLHG

SEQ ID NO: 12031 - protein, 169 aa, Homo sapiens
ASPKPVLCHQSKERKPSAEMNRITTKEATSSCPPKSPLGETRQKLWRSLKMLPERGQRVRQQLKKPPRHCELVVTLGCPEIHGDLRPWDRKRQPRSLRGSHLGGQRLHGSLCGHISQKPLTAPGTKRQKGPHQEGREESKPEHQGLAEPENDQLPEEYQQPPPFAPGYC

SEQ ID NO: 12032 - protein, 113 aa, Homo sapiens
GLSEILAIGFCPHQVQRGPLGKVLQSLAAQLPGPFTRLVHRRQSLHAVPKCIHAVPCSFTLFHLPQEGLQRPEFLAPWGLHLKATPVWPFANPRCCSILGAGGYFVQLTLGMS

SEQ ID NO: 12033 - protein, 133 aa, Homo sapiens
QRPGSCPYRYPHGWTGLCTPRWASWPKTGSPSGSMVQSQERMLRTCWSHSHWDPFSSGSVTAMWATHSPTSKAWAGIQGRGRWALGFPWRGQGVLHVIASQKAAVTEAVDLRTGAASQAMSEAFSRSGMFYLR

SEQ ID NO: 12034 - protein, 101 aa, Homo sapiens
PPETLEEPQNAPRERPEGPAAAKKPPRHCELVVTLGCPEIHGDLRPWDRKRQPRSLRGSHLGGQRLHGSLCGHISQKPLTAPGTKRQKGPHQEGREVGQLH

SEQ ID NO: 12035 - protein, 704 aa, Homo sapiens
  DOMAIN (343)..(358): SH2 DOMAIN SIGNATURE domain identified by eMATRIX, accession number PR00401A, p-value=2.957e-13, raw score of 14.00
  DOMAIN (343)..(418): Src homology domain 2 domain identified by PFam, accession name SH2, E-value=4e-26, PFam score of 79.0
MEPVEANGKDPKEGIQNPQAESGGLQQTPGHTHGALRHSQSQLDEVAACPQYGAASRVRKRPHWGWLTCLRKQELPRGSQPRPIDVQTLNRNPGSCRHWHSYSEGLGHPRVSQVCDPRASALEETERSRAVLLWDWDLGMQGSASRDHQGASTGQKPRLGDPPGQATERGLPKASPVSPIKGKEAVSRDEQNNHQGSHFLLPPKIPSWRDPPETLEEPQNAPRERPEGPAAAKKATSPPVNIVVTLGCPEIHGDLRPWDRKRQPRSLRGSHLGGQRLHGSLCGHISQKPLTAPGTKRQKGPHQEGREEAMTEAGKLPLPLPPRLDWFVHTQMGQLAQDGVPEWFHGAISREDAENLLESQPLGSFLIRVSHSHVGYTLSYKAQSSCCHFMVKLLDDGTFMIPGEKVAHTSLDALVTFHQQKPIEPRRELLTQPCRQAEGGDHKKDPANVDYEDLFLYSNAVAEEAACPVSAPEELFPPHIRLFYRYQDLAPQLVPLDYTTCPDVKVPYELIGSMPELKDNPFRQRIAQVFSEDGDGHMTLDNFLDMFSVMSEMAPRDLKAYYAFKIYGLQMETPGCKEFRSLQTFLWKMEQCETAWNSMDAFGNCVEALSPLPQLPDGGPQEQSSNCTSSFSSHLPYLYISRGDNMDKPGKWPGQLGSQRFVKPFQVVLFEPDEDKSQWPIISESPQKCTDIPFFVHGDRRLST

SEQ ID NO: 12036 - protein, 74 aa, Homo sapiens
RSEGQPAVFSWMRQTPEGKELAPWWPAVCRAPQDPAWAPFQASSSFGPMLSPAGPREATCNYAAFRLPPQPPGH

SEQ ID NO: 12037 - protein, 37 aa, Homo sapiens
CPTLCVWGRGSQGPPSPTIAPMFAYPPPPSPFTYACC

SEQ ID NO: 12038 - protein, 154 aa, Homo sapiens
  DOMAIN (82)..(107): D-isomer specific 2-hydroxyacid dehydrogenases NAD-binding si domain identified by eMATRIX, accession number BL00065B, p-value= 6.121e-09, raw score of 16.97
  DOMAIN (16)..(98): D-isomer specific 2-hydroxyacid dehydrogen domain identified by PFam, accession name 2-Hacid_DH, E-value=2.9e-05, PFam score of 13.7
DAAGANLKVISTMSVGIDHLALDEINKRGIRVGYTPDVLTRYHRRTRSLPATYHLPPVAGGHRGSEEWWWTSWKPLWLCGYGLTQSTVGIIGLGRIGEAPTGPLARPGSHSVVCIPGTTCLKAEKTHMLSGHFACSRDISNEGYSFVKHRQIHK

SEQ ID NO: 12039 - protein, 53 aa, Homo sapiens
IGGVTKVIYCVMEDNFVLCCFLNHTNILKSCTSQMIVILQMLCKMGQGVEIYI

SEQ ID NO: 12040 - protein, 61 aa, Homo sapiens
GKIYTYTCVCVCLCVCVCIYIYFHALPRLTKQCGGSRSSGKCMTLGYWYDLGNSTVQNYLP

SEQ ID NO: 12041 - protein, 110 aa, Homo sapiens
TKFRSRSLTSGLFAGGVGAEPDWSGQRHAGAVPRAQPRRGRGRGWRAARPSSPKHAGRVAPSCLVGSLITTWPVNHPKEAGNESGAFSAPGLSPSFLGFQGHSLEARWRV

SEQ ID NO: 12042 - protein, 36 aa, Homo sapiens
ASFQGTYSSDHREKLTSVIFFCLTYTHTHTHTHTHS

SEQ ID NO: 12043 - protein, 171 aa, Homo sapiens
RDTVSLAPYLEKCLFGVRGRGGAWPKVKAEGRNAWPLHPVPSIIPGSHPMPAELKHKTREVPARKARSGDAEHPGVSADHPLLLGPGPGPTLHHTFPGRGSPWLCPNWVPFLYMCEPRGCLLLCSPLNPKNVGSHHFNLNIFKKHFFFWRQSLAVSPTLLTPGSLSSPRAT

SEQ ID NO: 12044 - protein, 299 aa, Homo sapiens
MCLSLDPCKLLSPVKIVAYIDRCVCAGRSSSQSPVIARKGKCLVSPKGFSVVKVAALSRRLLPVLPTARKSEKGSETAPNRLPGCHAALAGRKTGCGILSPGPVSALPLPSHPFFSSPSVPHEAASESFINMSDPVIQGSLSPGVTVQGQLGTWPHKQEEYTLVVYIIDGVDFVTSNSSRRVVIETYFKELARGIVGPGNLKSAEKAAAEIQTLALRALLLRVGGRRVPCNNLEGNFTDRKTAGEEKRVSPFELMSTHTSIIHRSAHGPHLDPYNRHTYLYNRPYATNYPSNITPQDHS

SEQ ID NO: 12045 - protein, 709 aa, Homo sapiens
MLLECEEEAVCVIMCASVKYNIRGPALIPRMKTKHRIYYITLFSIVLLGLIATGMFQFWPHSIESSNDWNVEKRSIRDVPVVRLPADSPIPERGDLSCRMHTCFDVYRCGFNPKNKIKVYIYALKKYVDDFGVSVSNTISREYNELLMAISDSDYYTDDINRACLFVPSIDVLNQNTLRIKETAQAMAQLSRWDRGTNHLLFNMLPGGPPDYNTALDVPRDRALLAGGGFSTWTYRQGYDVSIPVYSPLSAEVDLPEKGPGPRQYFLLSSQVGLHPEYREDLEALQVKHGESVLVLDKCTNLSEGVLSVRKRCHKHQVFDYPQVLQEATFCVVLRGARLGQAVLSDVLQAGCVPVVIADSYILPFSEVLDWKRASVVVPEEKMSDVYSILQSIPQRQIEEMQRQARWFWEAYFQSIKAIALATLQIINDRIYPYAAISYEEWNDPPAVKWGSVSNPLFLPLIPPQSQGFTAIVLTYDRVESLFRVITEVSKVPSLSKLLVVWNNQNKNPPEDSLWPKIRVPLKVVRTAENKLSNRFFPYDEIETEAVLAIDDDIIMLTSDELQFGYEVWREFPDRLVGYPGRLHLWDHEMNKWKYESEWTNEVSMVLTGAAFYHKYFNYLYTYKMPGDIKNWVDAHMNCEDIAMNFLVANVTGKAVIKVTPRKKFKCPECTAIDGLSLDQTHMVERSECINKFASVFGTMPLKVWEHRA

SEQ ID NO: 12046 - protein, 90 aa, Homo sapiens
HWREEAGLTAQRPDTHCFLYIQENEIYTGNTGCTFGGGVSYKANVAHHQPPARGRKVTEPPPRWERDARRPTEPSGLPWPEHTQRACGWS

SEQ ID NO: 12047 - protein, 48 aa, Homo sapiens
PVWATRDCNLQEISTVCQDLCPPLPPPNPHCSAQGGGEGDPLFRLTTL

SEQ ID NO: 12048 - protein, 70 aa, Homo sapiens
TLVNMVEADVTTRCLIRSGIRVGYTPDVLTRYHRRTRSLPATYHLPPVAGGHRGSEEVSERRPGAVAHGC

SEQ ID NO: 12049 - protein, 159 aa, Homo sapiens
  misc_feature (1)...(159): Xaa = X or * as defined in Table 2
CWRSTATCYQWVIKSANRCTLQVGTRRRTMDNGDERHSRICPGMXEAARSLFIPTCQRTRHXRPVPQRLRSNTAPIRTRPRPSVHRPTGRESMPRTRPPEPEPLQTPLAATKRRSTSENASYSDALLRGLGKLSGKDREARRGPRSRPGSRVQTAGAAL

SEQ ID NO: 12050 - protein, 50 aa, Homo sapiens
YDDTNEYFAIKTYYFKIYIYIYLYICIFLQNYYKLCLMMVSYKKQGGKGP

SEQ ID NO: 12051 - protein, 60 aa, Homo sapiens
  misc_feature (1)...(60): Xaa = X or * as defined in Table 2
MGQELRHFGTVTWPMHRKMERRXFPREQGPGXQLLPQWRGNEKTLGSAGRQGEDHRLRAE

SEQ ID NO: 12052 - protein, 36 aa, Homo sapiens
YPPPGPLQINNTHSIPPPPTPYVGFQGQLKNRWDKN

SEQ ID NO: 12053 - protein, 94 aa, Homo sapiens
GLLSSSATHEAHGCHIDLYQQMLRRSHSDFAMGRGRRAWGEGGREGTRWSPWMGSLGGLAGLGKNPGNNGTWRSSSVRMPCQGRKASGKIPPVT

SEQ ID NO: 12054 - protein, 383 aa, Homo sapiens
MGSEAGCLVRAERFQLIVERDVRSSFPSWKELSMPGFIQKQQARVYVQFFLADALILPVPRPCLHSATPSTPQTDPTGPEGPHLGQSRLFLLCHKEALMKRNFCVPPGASPEVPKPALSFYVLGSWLGGTQRKEGTGWGLPEPQGNDDNDQKVHLIFFGSSVRWFEFLHPGQVYRLIAPGPATPMLFEKDGSSCISRRPLELAGCASCLTVQDNWTLELESSQDIQDVLDANKSLPESSLTDLLSDKSHNVYCCFRSSTYVQVLSFPPETTISIPLPHIYLAELLQGGQSPFQATASCHIVSVFSLQLFWVCAYCTSICRQSSARVDEPMTMFLWTLCTSPSVLRPIVLSFELERKPSKIVPLGTPSRSSSFQPFAARAKGGK

SEQ ID NO: 12055 - protein, 77 aa, Homo sapiens
KEKVKVNWLLNPLPKAQEFGYPSPSLPATLHLKLGSRPCKLQDHCCCHMVIHTGHHGFGSPILHQEPMGSRRKYSRL

SEQ ID NO: 12056 - protein, 91 aa, Homo sapiens
KKKDSVRPGPPLTLRPFCPSRRPPTCPAANSIAAWLGPGSVCCPLPSAQPRFYLGFWWLHLIKVVCNFGTKVVPCPACCWPSTLNPSVTHG

SEQ ID NO: 12057 - protein, 322 aa, Homo sapiens
  DOMAIN (219)..(270): D-isomer specific 2-hydroxyacid dehydrogenases NAD-binding si domain identified by eMATRIX, accession number BL00065C, p-value= 3.700e-27, raw score of 27.25
  DOMAIN (77)..(299): D-isomer specific 2-hydroxyacid dehydrogen domain identified by PFam, accession name 2-Hacid_DH, E-value=4.8e-40, PFam score of 98.6
RCSSPAGYPPRCRVALARAADCEVEQWDSDEPIPAKELERGVAGAHGLLCLLSDHVDKRILDAAGANLKVISTMSVGIDHLALDEIKKRGIRVGYTPDVLTRYHRRTRSLPCSYHLAPLAGGLQGSEEWWWTSWKPLWLCGYGLTQSTVGIIGLGRIGPGPLLGVLKPFGVQRFLYTGRQPRSEEAAEFQAEFVSTPELAAQSDFIVVACSLTPATEGLCNKDFFQKMKETAVFINISRGDVVNQDDLYQALASGKIAAAGLDVTSPEPLPTNHPLLTLKNCVILPHIGSATHRTRNTMSLLAANNLLAGLRGEPMPSELKL

SEQ ID NO: 12058 - protein, 51 aa, Homo sapiens
  DOMAIN (19)..(35): w SPAC8A404C RESISTANCE SPAC8A4.05C DAUNORUBICIN. domain identified by eMATRIX, accession number DM00191C, p-value=4.945e- 09, raw score of 10.57
CVHSQETRGAASTSPGSRTTSQPSTHSTTATTTPPPNRAPPPSRPPPRPSV

SEQ ID NO: 12059 - protein, 46 aa, Homo sapiens
CLEVCAGYHHHHHRHHHHHQTSLERSKPKCTLGHMALWHSEKYSSC

SEQ ID NO: 12060 - protein, 53 aa, Homo sapiens
VRAGPLTLLKEHSQLFKLSFQKEMENFEAPFHCLAKRFHQLYREKVEVFRALA

SEQ ID NO: 12061 - protein, 371 aa, Homo sapiens
  DOMAIN (172)..(198): Calponin family repeat proteins domain identified by eMATRIX, accession number BL01052B, p-value=8.875e-26, raw score of 15.31
  DOMAIN (287)..(351): Calponin family domain identified by PFam, accession name calponin, E-value=1e-20, PFam score of 71.8
  misc_feature (1)...(371): Xaa = X or * as defined in Table 2
MHQEDLRAWYLDLGLPSHQNAQPTAWKCQRAPSPYTHQDMALIPSPTARWLSPEKEPKQGEVGEKSLLPDPTLPLTDPRLTGSTEQAHAEGLAALMSALRVSHLQGRGGVVTLVDSQLGVIAVSSTQFNKGPSYRLLADVQNRLLPKYDSQKEAELRSWIKGFTGLSIRPDFQKGLKDGIILCTLVNKLQPGSVPKINASVXNWHXLENLSNFLKAMVSYGMNPVDLFEANNLFESGNNMQVRVSLLALAGKAKTKGLRSGVDIRDKYSEKQNFDDTTMKASQCVIRLQITNKCASQSGMTAYGTRRHLYDPKNRILPPMDNSTISLQMGTNKCASQVGMTAPGTQRHIYDTKLGIDKCENSSMSLKMGYT

SEQ ID NO: 12062 - protein, 210 aa, Homo sapiens
  DOMAIN (181)..(199): CALPONIN SIGNATURE domain identified by eMATRIX, accession number PR00889F, p-value=1.419e-09, raw score of 11.62
LQHRLLSPALTAETLQPQLQPLRRGLRGRNDSSKPAADPSPACTPPAVVHCRWSSALSSSHPHGLLTAQLSASLPSLLYRWSSQQPTYSWGSAIPVSPVQSLPLSPPKAALSAAPAPPGERSAGESNREKRTGRGWLTNTNLQLDRSNEHTYDTKLGIDKCDNSSTSLKMGYTQGAHQSGQAFGMGLQIYDPRYYWGGPVAHGAPSGSGP

SEQ ID NO: 12063 - protein, 63 aa, Homo sapiens
  misc_feature (1)...(63): Xaa = X or * as defined in Table 2
TGSWSQCTPSCXTTMCVYTFMTYTWAWGCPPNHVQPHAXPVSPTVLLNVGFRAKAVFSGHGYL

SEQ ID NO: 12064 - protein, 352 aa, Homo sapiens
APSKKLRSATLRRPGSSKDTARGPVSVGWCPSQEPLGARCATSCPWLCRLPSSVFSPRALAIRLGGGSGSLSAGCAARLQGSVPCWPLARLRSASATPLSELRQQPAPPPRCDPGSRLSVPVAPCPAPRAPQPRRLPSPGPRFCRCPSLSVCRSLGPVSPPPQPFLPPCLPRWLARSLALGRGETASQANPRNLCKKLAMKFKKFFDFGAIFEWSQSFPLSPRPVRFPLEPEGSPVPASLPERPSPRHPASSSGRLQDPGLILCSLCHYLFIRTDYAVVTRAGNGGECVWLQKFPVKLASLMMSFGLYIGHFLGVPPANPQEAPRTRSFFTPKSVMEPSAVPGTAERVLHPG

SEQ ID NO: 12065 - protein, 25 aa, Homo sapiens
VCDPSVMCCPPKVPMGSPRPCSMEE

SEQ ID NO: 12066 - protein, 102 aa, Homo sapiens
KHLRWPLRTGDSEPPVPRGSSEAEGPLPSPTTAGGHGQGSCRRPGKVSIRPPGIHHRSYFLKCNEPQGLSGMRALCTPLALAWGVPSVRLPGRRGHSPAMQV

SEQ ID NO: 12067 - protein, 193 aa, Homo sapiens
  DOMAIN (88)..(131): Integrins beta chain cysteine-rich domain proteins domain identified by eMATRIX, accession number BL00243I, p-value=6.016e- 12, raw score of 31.77
DLPSRHRVMEAICHVCCVRRGCCVCACICVCHMCSVWCVRCVLCVPQVLCVVHALCVCVCCLQCARYVWCMCCVCSVLCMRCVCVCVPRVLCVCVCCGCSRCSVWCVCCVCRVCLCVCACAVWCVCCMCLCVLCVCACACVCCVCRVCSVWCVRCVCVCCACSVWCVLWCVCVCMQCVCYVWCMCCVCCVCLE

SEQ ID NO: 12068 - protein, 35 aa, Homo sapiens
SCCRGTACGPESGTKKVPRAHVSREAVAQSGPKPL

SEQ ID NO: 12069 - protein, 74 aa, Homo sapiens
MSLPIGIYRRAVSYDDTLEDPAPMTPPPSDMGSVPWKPVIPERKYQHLAKVEEGEASLPSPAMTLSSAIDSVDK

SEQ ID NO: 12070 - protein, 85 aa, Homo sapiens
HLSVRLVITSFHCALEASAPLGKMSLPIGIYRRAVSYDDTLEDPAPMTPPPSDMGSVPWEPVISERKYQHLAKVEEREASLPSPA

SEQ ID NO: 12071 - protein, 300 aa, Homo sapiens
VAPSKARMSPAHRDYTAGAVSYDDTLEDPAPMTPPPSDMGSVPWKPVIPERKYQHLAKCGGRRGQSTLPCHDPVIKPFDSVDKAPKWVKAKATHVIMNSLITKQTQESIQHFERQAGLRDAGYTPHKGLTTRGDQVPFELAEALHKLKLQSGEVNKRRRGSLHQPSPPQAPLRTPLPKQRPRGWFTSGSSTGLPGPNPSIMDSGSWGIKDKKLCSDKWSLFGPRSLQKYDSGSFATQAYRGAQKPSPLELIRAQANRMAEDPAALKPPKMDIPVMEGKKQPPRAHNLKPRDLNVLTPTGF

SEQ ID NO: 12072 - protein, 98 aa, Homo sapiens
PFESICSPIGANESSCCETGIKCVCSRRCRCGCTYKANSLIQGEGEMEELTDLKVGLCCLKLGFCTHMPCMCVYNCNLEPSGSKNLFGSFLSKKVIRV

SEQ ID NO: 12073 - protein, 60 aa, Homo sapiens
LHWPGSLAAAQEFLKRGRSPPVRAGLLTMWGLYYVGGLGFSFTEMLSHQLCPTCPNSSPL

SEQ ID NO: 12074 - protein, 42 aa, Homo sapiens
EREFCFATQVGGQGGDFGSLNPLTPRLKFFSCLTPPISWITG

SEQ ID NO: 12075 - protein, 81 aa, Homo sapiens
VMRLKPSSTGASCSNSLCVNMPSWSVTRFWLAAGSRPPPRSHRNAGSLPPGPRSCSAPLSHPHCLRRSGNHRKSSPQTGAE

SEQ ID NO: 12076 - protein, 220 aa, Homo sapiens
RDVAVRCFEVTGLHDVDQGWMRAVRKHAKGLHIVPRLLFEDWTYDDFRNVLDSEDEIEELSKTVVQGGKEPAFRWLRGGGLEPAAKPRSALGLIHMLTHFGRGSAPGPAAGPPGSSRLPSPPGPTSWACSRTRSFEQLAPVLGWFSAFIDLTDYFYSAFSLALIAPLSWVRACVPGPGPESPKWRSKNPSWGFNFLWYGTTRPPRMPVSLVVGPQVHPRH

SEQ ID NO: 12077 - protein, 68 aa, Homo sapiens
CGLFKISNTPMLVSSIDTTSFKWIPRCNCSYCLCLSCSSHCLNTYHCLNGNYFAIVKKHYQLGLIVGS

SEQ ID NO: 12078 - protein, 286 aa, Homo sapiens
GATLGGMSEHVEPAAPGPGPNGGGGGPAPARGPRTPNLNPNPLINVRDRLFHALFFKMAVTYSRLFPPAFRRLFEFFVLLKRVLERRPQLTVGVEELRLLVVLPMAVRPQVAHCTPGIGAPASRSRVTEGPCAPGSLACDFESDQFFPESLGFHVAVGAPLAQLGPQFCGSGQQVDVTLTRLGGDAWTSGWEALFVLFVLAYIHIVFSRSPINCLEHVRDKWPREGILRVEVRHNSSRAPVFLQFCDSGGRGSFPGLAVEPGSNLDMEDEEEEELTMEMFGNSSIK

SEQ ID NO: 12079 - protein, 59 aa, Homo sapiens
GGPFKKTLGGPKFNGGWKGKIFSLKGGVLKTTWGFLEKNLFFGGGKYGPNPPPKFKGFR

SEQ ID NO: 12080 - protein, 130 aa, Homo sapiens
GSQAVGVSQHHTIPKVPGDLLWLIGGSSGVGCCPAVEEEQQSDMSPPFGDQASALWWGPGTRHTGGHHSPMDNTNCPQQRARNPLGASSVSSPKIPILKNTISGMLLHQRRFFEIAHLPELSKYRSFHFL

SEQ ID NO: 12081 - protein, 132 aa, Homo sapiens
  DOMAIN (21)..(67): grpE protein domain identified by eMATRIX, accession number BL01071A, p-value=7.889e-10, raw score of 24.88
NKKKKRDGDDRWFRLVLSFDEEKRREKAAIEEIKQRLKEEQRKLREERHQEYLKMLAEREEALEEADELDRLVTAKTESVQYDHPNHTVTVTTISDLDLSGARLLGLTPPEGGAGDRSEEEASSTEKPTKAL

SEQ ID NO: 12082 - protein, 38 aa, Homo sapiens
VVNDLVTGEGRRNWSQTSQQKQQRQHAVGTPGEQQALW

SEQ ID NO: 12083 - protein, 142 aa, Homo sapiens
GATLGGMSEHVEPAAPGPGPNGGGGGPAPARGPRHPQFSTPTPLINVRDRLFHALFFKMAVTYSRLFPPAFRRLFEFFVLLKALFVLFVLAYIHIVFSRSPINCLEHVRDKWPREGNPALWKVRHNSSRAPVFLQFCDSGGR

SEQ ID NO: 12084 - protein, 137 aa, Homo sapiens
  DOMAIN (48)..(94): grpE protein domain identified by eMATRIX, accession number BL01071A, p-value=5.345e-09, raw score of 24.88
LQGEEAGGLTAMGRNKKKKRDGDDRRPRLVLSFDEEKRREYLTGFHKRKVERKKAAIEEIKQRLKEEQRKLREERHQEYLKMLAEREEALEEADELDRLVTAKTESVQYDHPNHTVTVTTISDLDLSGARAARADPT

SEQ ID NO: 12085 - protein, 38 aa, Homo sapiens
SVFCQNCSKAPVSNSVGVFMGKNKTKQKRWLIRPRRCC

SEQ ID NO: 12086 - protein, 159 aa, Homo sapiens
  misc_feature (1)...(159): Xaa = X or * as defined in Table 2
VQNRTLHFSLLYEPKRKSKPESYLYCYKIFQDEPLAPXAFLXIPASLSQIQXFTSRKGKASQNLIYIVIKYSKMSLWPPEPSCKYLPPCLKSNSSQLSWLLWCVLVWGVGWKYCQGWGGPPLHLVSLWGGYSASRWEDIGKQHTSLRGVPKGVIFIIYI

SEQ ID NO: 12087 - protein, 53 aa, Homo sapiens
MDNSASVEQLQETLLRALRALVLKNRPLDTSRFTKLLLKLPDCGPFISSLGHN

SEQ ID NO: 12088 - protein, 148 aa, Homo sapiens
  DOMAIN (111)..(131): RETINOIC ACID RECEPTOR SIGNATURE domain identified by eMATRIX, accession number PR00545G, p-value=1.196e-10, raw score of 10.25
  DOMAIN (2)..(133): Ligand-binding domain of nuclear hormone domain identified by PFam, accession name hormone_rec, E-value=0.052, PFam score of - 7.2
GREGGLTGWEVTSPAEPTLPAFRHLLLLGQRPGRRYGTPSPSPSAFWGASGRGCIACQVLADLRFLLRGARGVRLTAVVFPTDRSGMENSASVEQLQETLLRALRALVLKNRPLETSRFTKLLLKLPDLRTLNNMHSEKLLSFRVDAQ

SEQ ID NO: 12089 - protein, 185 aa, Homo sapiens
  DOMAIN (58)..(81): THYROID HORMONE RECEPTOR SIGNATURE domain identified by eMATRIX, accession number PR00546I, p-value=9.900e-10, raw score of 17.13
RGCPFGGRKAPFGLLFNVKDQTVMFLSRTTYSLQELGAMGMGDLLSAMFDFSEKLNSLALTEEELGLFTAVLLVSADRSGMENSASVEQLQETLLRALRALVLKNRPLETSRFTLLLLKLPDLRTLNNMHSEKLLVLSGWTAPVTPPRAGLSAGCPLCTESELCTSLSFYETEKEKQTRILFILL

SEQ ID NO: 12090 - protein, 115 aa, Homo sapiens
VLMVRFASLFNVKDQTVMFLSRTTYSLQELGAMGMGDLLSAMFDFSEKLNSLALTEEELGLFTAVVLVSAGRSGSRLTRGRRQTQFNSTHLLWSTYSMPGPAPGTGVYRHDSDTV

SEQ ID NO: 12091 - protein, 56 aa, Homo sapiens
RVFCPRLKNFPLPPGKKRFLEKGKKGDFWPREKGKPPPFLISPPQSLNPVLFWGFF

SEQ ID NO: 12092 - protein, 46 aa, Homo sapiens
KLQVLLPLHWSVLCSPWPTCWNFLTKLILGFSLKQGNPLQNVSQEI

SEQ ID NO: 12093 - protein, 130 aa, Homo sapiens
PCPIALPTFKFNIVFKQGFSFIFPLTKSNPREGATEMGKTGTTGILKLQRGTVPPNETLKKWNNPSSRPTLCPQNSCPHPMKHRVNTLAGLRTSGLPGPMGQRQGSPRTATWPSSPATLASLGPPPLLSL

SEQ ID NO: 12094 - protein, 93 aa, Homo sapiens
NKNLEISFFFETESRCCQPRLECNGAISVHCNLCLPGSSNSPTSASQVAEMTGVCHHAQLIFVFLVAMVFHLHVGQGGLELLTSGGPPASASQ

SEQ ID NO: 12095 - protein, 44 aa, Homo sapiens
LPRDASREGCRLWDILNQCCSRDLSIDVECSLCCQTGQPLATCG

SEQ ID NO: 12096 - protein, 37 aa, Homo sapiens
CARTMGGTPSGWHCCTPAEPSCSPRLCGTHYHHACHH

SEQ ID NO: 12097 - protein, 37 aa, Homo sapiens
CARTRGGTPSGWHCCTPAEPSCSPRLCGTHYHHACHH

SEQ ID NO: 12098 - protein, 61 aa, Homo sapiens
ECLTSLSSSLQRWHAPPALPAQVNKPHAACFKWQLKASQCWAVLTPLWSSWRGTGSLWGKG

SEQ ID NO: 12099 - protein, 64 aa, Homo sapiens
  misc_feature (1)...(64): Xaa = X or * as defined in Table 2
SLNFHIGQXAQPHAGFGLRGSXGPCPPCCQANACXAPEPNDSMEDQAPGVRHPPLSNVKIQGSE

SEQ ID NO: 12100 - protein, 459 aa, Homo sapiens
VFLASLPTISCLGNAVVESYSVLGNCRPSDPYSMNSVYSYHSYYAQPSLTSVNGFHSKYALPSFSYYGFPSSNPVFPSQFLGPGAWGHSGSSGSFEKKPDLHALHNSLSPAYGGAEFAELPSQAVPTDAHHPTPHHQQPAYPGPKEYLLPKAPLLHSVSRDPSPFAQSSNCYNRSIKQEPVDPLTQAEPVPRDAGKMGKTPLSEVSQNGGPSHLWGQYSGGPSMSPKRTNGVGGSWGVFSSGESPAIVPDKLSSFGASCLAPSHFTDGQWGLFPGEGQQAASHSGGRLRGKPWSPCKFGNSTSALAGPSLTEKPWALGAGDFNSALKGSPGFQDKLWNPMKGEEGRIPAAGASQLVFYQHKNLNQPNHGLALWEAKMKQLAERARARQEEAARLGLGQQEAKLYGKKRKWGGTVVAEPQQKEKKGVVPTRQALAVPTDSAVTVSSYAYTKVTGPYSRWI

SEQ ID NO: 12101 - protein, 621 aa, Homo sapiens
  DOMAIN (527)..(554): POTASSIUM CHANNEL SIGNATURE domain identified by eMATRIX, accession number PR00169H, p-value=3.769e-33, raw score of 8.09
  DOMAIN (277)..(549): Ion transport protein domain identified by PFam, accession name ion_trans, E-value=2.3e-82, PFam score of 287.0
GGGRAPPGVFAEPEGGASGASVPAAAGGPERLEERSGNWEELARLEGGPLRPGAGSQAPLGAKPRVFSGSQFHTRLCAVPGIPWRGAHLRGGMRSEKSLTLAAPGEVRGPEGEQQDAGDFPEAGGGGGCCSSERLVINISGLRFETQLRTLSLFPDTLLGDPGRRVRFFDPLRNEYFFDRNRPSFDAILYYYQSGGRLRRPVNVPLDIFLEEIRFYQLGDEALAAFREDEGCLPEGGEDEKPLPSQPFQRQVWLLFEYPESSGPARGIAIVSVLVILISIVIFCLETLPQFRVDGRGGNNGGVSRVSPVSRGSQEEEEDEDDSYTFHHGITPGEMGTGGSSSLSTLGGSFFTDPFFLVETLCIVWFTFELLVRFSACPSKPAFFRNIMNIIDLVAIFPYFITLGTELVQQQEQQPASGGGGQNGQQAMSLAILRVIRLVRVFRIFKLSRHSKGLQILGKTLQASMRELGLLIFFLFIGVILFSSAVYFAEADDDDSLFPSIPDAFWWAVVTMTTVGYGDMYPMTVGGKIVGSLCAIAGVLTIALPVPVIVSNFNYFYHRETEQEEQGQYTHVTCGQPAPDLRATDNGLGKPDFPEANRERRPSYLPTPHRAYAEKRMLTEV

SEQ ID NO: 12102 - protein, 538 aa, Homo sapiens
  DOMAIN (444)..(471): POTASSIUM CHANNEL SIGNATURE domain identified by eMATRIX, accession number PR00169H, p-value=3.769e-33, raw score of 8.09
  DOMAIN (194)..(466): Ion transport protein domain identified by PFam, accession name ion_trans, E-value=2.3e-82, PFam score of 287.0
WRGAHLRGGMRSEKSLTLAAPGEVRGPEGEQQDAGDFPEAGGGGGCCSSERLVINISGLRFETQLRTLSLFPDTLLGDPGRRVRFFDPLRNEYFFDRNRPSFDAILYYYQSGGRLRRPVNVPLDIFLEEIRFYQLGDEALAAFREDEGCLPEGGEDEKPLPSQPFQRQVWLLFEYPESSGPARGIAIVSVLVILISIVIFCLETLPQFRVDGRGGNNGGVSRVSPVSRGSQEEEEDEDDSYTFHHGITPGEMGTGGSSSLSTLGGSFFTDPFFLVETLCIVWFTFELLVRFSACPSKPAFFRNIMNIIDLVAIFPYFITLGTELVQQQEQQPASGGGGQNGQQAMSLAILRVIRLVRVFRIFKLSRHSKGLQILGKTLQASMRELGLLIFFLFIGVILFSSAVYFAEADDDDSLFPSIPDAFWWAVVTMTTVGYGDMYPMTVGGKIVGSLCAIAGVLTIALPVPVIVSNFNYFYHRETEQEEQGQYTHVTCGQPAPDLRATDNGLGKPDFPEANRERRPSYLPTPHRAYAEKRMLTEV

SEQ ID NO: 12103 - protein, 96 aa, Homo sapiens
NALRIPRGGLLAFYSVLSIKISIPIFFTNKRGFFNPKEGLQAGKRGRQWWVKSPVPSRTCHQHHHLPRKTPSPACGPLPLPPGYPPFIAFDFKINI

SEQ ID NO: 12104 - protein, 149 aa, Homo sapiens; identical to SEQ ID NO: 8286
  DOMAIN (33)..(55): Globins profile domain identified by eMATRIX, accession number BL01033A, p-value=3.250e-20, raw score of 16.94
  DOMAIN (9)..(149): Globin domain identified by PFam, accession name globin, E- value=4.6e-57, PFam score of 203.0

SEQ ID NO: 12105 - protein, 128 aa, Homo sapiens
  misc_feature (1)...(128): Xaa = X or * as defined in Table 2
HHELQYPIRFCPIKSCCKGRNSLQNKIYDLSLQNFPPATLRQNLALSPRLECSGTISAPCNLHLPGSSDSPASASRVAGNAGMHCHKQLIFVFLVETGFHHVAQAGLRTPXPCGSGPPRGPKSAGDLQ

SEQ ID NO: 12106 - protein, 732 aa, Homo sapiens
MTNLAMVERDSEAGTAASRFPGNHAAKGKAQAHYKVWRPAEVRCLKLGPEWVTLRYTIKHRPYKLCGKRQHVFFFTSRSDVGFMLTTLKPFGSVSVESKMNNKAGSFFWNLRQFSTLVSTSRTMRLCCLGLCKPKIVHSNWNILNNFHNRMQSTDIIRYLFQDAFIFKSDVGFQTKGISTLTALRIERLLYAKRLFFDSKQSLVPVDKSDDELKKVNLNHEVSNEDVLTKETKPNRISSRKLSEECNSLSDVLDAFSKAPTFPSSNYFTAMWTIAKRLSDDQKRFEKRLMFSHPAFNQLCEHMMREAKIMQYKYLLFSLHAIVKLGIPQNTILVQTLLRVTQERINECDEICLSVLSTVLEAMEPCKNVHVLRTGFRILVDQQVWKIEDVFTLQVVMKCIGKDAPIALKRKLEMKALRELDRFSVLNSQHMFEVLAAMNHRSLILLDECSKVVLDNIHGCPLRIMINILQSCKDLQYHNLDLFKGLADYVAATFDIWKFRKVLFILILFENLGFRPVGLMDLFMKRIVEDPESLNMKNILSILHTYSSLNHVYKCQNKEQFVEVMASALTGYLHTISSENLLDAVYSFCLMNYFPLAPFNQLLQKDIISELLTSDDMKNAYKLHTLDTCLKLDDTVYLRDIALSLPQLPRELPSSHTNAKVAEVLSSLLGGEGHFSKDVHLPHNYHIDFEIRMDTNRNQVLPLSLDVGTTSATDIQRLLTYISFAGLSELKS

SEQ ID NO: 12107 - protein, 159 aa, Homo sapiens
  misc_feature (1)...(159): Xaa = X or * as defined in Table 2
LHTLDTCLKLDDTVYLRDIALSLPQLPRELPSSHTNAKGGQRSXAALLGGEGTPPSKDVHLAPHNYHIDFEIQNGTPNRNPSAYPLSDVDTTSCLQIFKEXLCYVFPRSAYCLGSSHPRGFLAMKMRHLNAMGFHVILVNNWEDGQTRDGRCQSPFLKT

SEQ ID NO: 12108 - protein, 95 aa, Homo sapiens
  DOMAIN (21)..(42): PROTEIN INTERGENIC REGION ABC1 PRECURSOR MITOCHONDRION T domain identified by eMATRIX, accession number PD01823D, p-value= 7.618e-09, raw score of 16.66
  misc_feature (1)...(95): Xaa = X or * as defined in Table 2
ATKAFEENEVYKTTLVVYCFFKCVILKASLXFRILLTEWFYMRWLKKYHIVCFPLGDAKIFCFMYITVLFKTLEDSCXTLVVYCFFKCVILKASL

SEQ ID NO: 12109 - protein, 108 aa, Homo sapiens
  misc_feature (1)...(108): Xaa = X or * as defined in Table 2
GIILFWAQLFPASFFFFFFFXDGVSLCCPGWSAVVRSQLTASSASRVQAILCLSLPSSWDYRHLPPCLANFFVFLCRDGGFTMLARLVLNSXASXVHPPWPPQSAGDY

SEQ ID NO: 12110 - protein, 99 aa, Homo sapiens
  DOMAIN (45)..(85): kw TRANSCRIPTASE REVERSE II ORF2 domain identified by eMATRIX, accession number DM01354Y, p-value=1.549e-14, raw score of 10.69
  misc_feature (1)...(99): Xaa = X or * as defined in Table 2
FSLIKISMMLLMKMEKXNLQFIWKPRRLQIAKARLNASSSSSSSSSSSSSSSSSSVVWYWHKKRHIDHWNRLENSNINRHICSQLILTKVPGANTKDHP

SEQ ID NO: 12111 - protein, 118 aa, Homo sapiens
STSHLSPLAGSRALSSSSPRVARSDMAVAQVLGTDGNRRGCTSSWHEALEDAQVGEDRHQGESGRPTRVRQEWVWSGQRHPPAKIKGKPSHTPRHVHEAPPSPFQPPFRTLSLSLSEF

SEQ ID NO: 12112 - protein, 104 aa, Homo sapiens
  misc_feature (1)...(104): Xaa = X or * as defined in Table 2
VLPPPSSPALHSPAPPSTCPYLPGAPPPLLPPCAGRSPPAAAAPHCPAPCAPRHXGSRXLESPAPQGPQSRAARMPAWPLPPAPPTDPTAPPAPRSHWPAAPPT

SEQ ID NO: 12113 - protein, 105 aa, Homo sapiens
  misc_feature (1)...(105): Xaa = X or * as defined in Table 2
VLPPPSSPALHSPAPPSTCPYLPGALPPLEGPPSRRPPRTFIGNPGGQGPGEVSPIVLRSPSQPHXPGNQGPCPSSQPPGSPRSEHGCXHRCWALYGQQEKPAPS

SEQ ID NO: 12114 - protein, 66 aa, Homo sapiens
  misc_feature (1)...(66): Xaa = X or * as defined in Table 2
MGPTIPDXSXFFWRKPITWMPTWEGTSNVGPQPLSSSKSLHSXRGHPAPIPTGQAGPRDSGPGASP

SEQ ID NO: 12115 - protein, 536 aa, Homo sapiens
  misc_feature (1)...(536): Xaa = X or * as defined in Table 2
VESNTGRKWTEAAGTGDIQCLAWGSSGDGRGGDPRGRVPAAALGAAVVAAMASPDPWAPGPKQPGLMGRPGSSPALWAQPAXPPYFPGLTPPCPQEVPQSFGPPGEQGRVLRGGQNVTXGEGRVPQVCGRRPPCPSLMEPFVYTPASPFPSGQPQGTPGRRQDGEPRLGTGGQTGSPGPGLVSGPRGRAAKPGGTQGGLVRQVPPGEHPTPGEARIXHLGWVGCPXRMGQGNFGVASKPFLDLPGPMLGSTNCDNLGSFGLSGPMFPKWPTSTGRLPKGPSANXGGPGMERPPGVMPSSGHQDPEASGPLDLLVRAALQGGXALGHKGGASXTSQKAESLPQPLGPPGGGCYGITQNPLASGPKQTWSMGRPGSFPALWAQNRLTFLTPRPSPPCPQEVPQSFGPPGPSQGAERRARLSPRERGGFLKVCGRRPPCPSMMEPSCLHTCXPLSLPASLRQAKEPPSCGLRAPSXHLRRPCLTPPFRPQGLLGTSHCPQKPAPDSGLLHSPLNSPRGFSGQCNPRRLHPQLNPSNRDR

SEQ ID NO: 12116 - protein, 151 aa, Homo sapiens
  misc_feature (1)...(151): Xaa = X or * as defined in Table 2
ADPAAPVPWFGPSQPGARAQWPGLLGPAAPPPALCSPPXTDSGVQDPVSNAPWVNSQQWWRQPAATEKPPATKAPGLLVQEKYKVSRXQKGWPSTKKAKGYFPXNCPPLQFLLPPLLSLPPGDISGQCPHLPKPLIPPPSYPAPCPGFCPR

SEQ ID NO: 12117 - protein, 160 aa, Homo sapiens
  DOMAIN (50)..(61): ALPHA HAEMOGLOBIN SIGNATURE domain identified by eMATRIX, accession number PR00612B, p-value=1.000e-13, raw score of 10.92
  DOMAIN (46)..(133): Globin domain identified by PFam, accession name globin, E- value=0.0051, PFam score of 15.0
GLEFGTSHRLRENPPMVAVSCPTKTNVKGPPGGKVGAHAGEYGSEALERMFLSFPTTKTYFPHFDLSHGFAQVKGATAKKVADALTKAVANVDDMPNGAVRPEATLHAHKLRVEPVNFKLLKPLACLVDPGPAHLPGRVSPLAVARLPWNKVSWAFCGQI

SEQ ID NO: 12118 - protein, 96 aa, Homo sapiens [sequence omitted]

SEQ ID NO: 12119 - protein, 464 aa, Homo sapiens
  misc_feature (1)...(464): Xaa = X or * as defined in Table 2
LSTPTALVWPGHRPPXPIPXWPLCPQEGGPGGLPRGWSSGTVAPXSXAGGCEGKIQSYPQGSASWSEPAPSPSPAFPAPFLMLNCSGPLALSLSGPKWAREQLXCVPPRALATGLPLEVWLXLRPFPWPXCLPPPGPWVQLLHSLSSCWGPPPMPRTIRGIPPGSICRLCFCPAAGLPPWWLSSGQLPHPPGTPLCSVSXGGPDQPPLLCLSPWAPGLSSTALCHSRLVLPATPIPVVTWPSCGLSTTPPAPGATPTPAACFQQVPSAPDKPLLVSPSPAKHPPVPPPVGLGLRAMDRPPGPIPETPRDLPCHPTPPKSKLQARGPWPGWVDXTTSGWKLRKEALMGPTIPDPKSSSWAGPLVSLPLVLGGNPSPWNALRGKRDPRKCGNPQPPSPKLRKSPPTAPGKTPAPYSPREKAGPQKTLGPRGPPPXSRDPPLXLRTPADPGVRTRGAGPPAPPRRNP

SEQ ID NO: 12120 - protein, 291 aa, Homo sapiens
  misc_feature (1)...(291): Xaa = X or * as defined in Table 2
LDDALESCDEHGYRTASSSCLRKGVMVKSSSNRELVXSRYTDITISGSTSEFPDWAAGQRGSSHPRRWAARQRRSSLHLFYSEPDTDAKHQDDALTEEETXGSRSASCAHWLXSNCCTATGSSTLLPLTSRLXLPRMAVKSSRASAALPSSRFSSWHRACSASPAAATTAAPSAWGLSSNIPSGPAGCAPRPPTSFSLPGALPTTTRRRHSSDRSRRSPSRGLTSARESGSKSPPQGTARDSRQALRSAMVTKTSWRMELDRECGRSSCTSTFCVSAASRGFLLQTSFRWE

SEQ ID NO: 12121 - protein, 829 aa, Homo sapiens
  DOMAIN (136)..(191): Domain present in ZO-1 and Unc5-like netrin receptors domain identified by eMATRIX, accession number PF00791B, p-value=4.165e- 13, raw score of 28.49
  DOMAIN (99)..(304): Ank repeat domain identified by PFam, accession name ank, E- value=1.5e-26, PFam score of 101.6
MLRSLRLQQEWLEWEDRRRAAAQQCRSRRCPSSPRARLTRPHRSCRDPAVHQALFSGNLQQVQALFQDEEAANMIVETVSNQLAWSAEQGFWVLTPKTKQTAPLAIATARGYTDCARHLIRQGAELDARVGGRAALHEACARAQFDCVRLLLTFGAKANVLTEEGTTPLHLCTIPESLQCAKLLLEAGATVNLAAGESQETPLHVAAARGLEQHVALYLEHGADVGLRTSQGETALNTACAGAEGPGSCRRHQAAARRLLEAGADARAAGRKRHTPLHNACANGCGGLAELLLRYGARAEVPNGAGHTPMDCALQAVQDSPNWEPEVLFAALLDYGAQPVRPEMLKHCANFPRALEVLLNAYPCVPSCETWVEAVLPELWKEHEAFYSSALCMVNQPRQLQHLARLAVRARLGSRCRQGATRLPLPPLLRDYLLLHMKRSRCRDRPQPPPPDRREDGVQRAAELSQSLPPRRRAPPGRQRLEERTGPAGPEGKEQPPALASQSAEIAASARLPPRLGSEERLCLAAHRLGCEPPLCLAAQSGNLGDNGLPAGRQELKQGTHEETTALAQVRAEGLPVLVWMETEDLQVMSFRISLSRHGPKPSHPKSDSFSLAGSKSLLPFKDLKHTVNDEEGRWSAIPDTDGPSARAGGQTDPEQEEGPLDPEEDLSVKQLLEEELSSLLDPSTGLALDRLSAPDPAWMARLSLPLTTNYRDNVISPDAAATEEPRTFQTFGKAEAPELSPTGTRLASTFVSEMSSLLEMLLEQRSSMPVEAASEALRRLSVCGRTLSLDLATSAASGMKVQGDPGGKTGTEGKSRGSSSSSSSSRCL

SEQ ID NO: 12122 - protein, 631 aa, Homo sapiens
  DOMAIN (365)..(395): Flocculin repeat proteins domain identified by eMATRIX, accession number PF00624I, p-value=8.950e-10, raw score of 9.10
  misc_feature (1)...(631): Xaa = X or * as defined in Table 2
RCRKEMFSLCWAYYCIXKLQQIPMRLAPLPTLDPVXSPGGASTATNSGSSVTSSGVSTATISGSSVTSNGVSIVTNSEFHTTSSGISTATNSEFSTASSGISIATNSESSTTSSGASTATNSESSTPSSGASTATNSDSSTTSSGASTATNSDSSTTSSEASTATNSESSTTSSGASTATNSESSTVSSRASTATNSESSTTSSGASTATNSESRTTSNGAGTATNSESSTTSSGASTATNSESSTPSSGAGTATNSESSTTSSGAGTATNSESSTVSSGISTVTNSESSTPSSGANTATNSESSTTSSGANTATNSDSSTTSSGASTATNSESSTTSSGASTATNSESSTTSSGASTATNSGSSTTSSGTSTATNSESSTVSSGASTATTSESSTTSSGASTATNSESSTVSSGASTATNSESSTTSSGANTATNSGSSVTSAGSGTAALTGMHTTSHSASTAVSEAKPGGSLVPWEIFLITLVSVVAAVGLFAGLFFCVVSACVPLCECRDALKMPGGLEQLLTESRIVHWGTEGRPIATAEGWVLLLAMKIRLAAEAKIKCFLDGMAAGLRRSSLSRLGSQAEALPTSQTMGGQAETLLSSQTGSRPNRGLFSHLRRWAAGQRRSLTS

SEQ ID NO: 12123 - protein, 181 aa, Homo sapiens
  misc_feature (1)...(181): Xaa = X or * as defined in Table 2
FQRTKLLNGPGDVETGTSITVPQKKWLHVISPIFVQSLTLPFLAKWGDRLQLLQIELAAREVSDIXEETVXNETYLLLLCSRKTLDTLKWAHSIPSYARLFYIXXFSCSLKLAFSQFLLPADPYGVAVGGTVGHCLCTGLAVIGGRMIAQKISVRTVTIIGGIVFLAFAFSALFISPDSGF

SEQ ID NO: 12124 - protein, 90 aa, Homo sapiens
AAAPGNGRASAPRLLLLFLVPLLWAPAAVRAGPDEDLSHRNKEPPAPAQQLQPQPVAVQGPEPARVEVSGPGWGERGCRAGCAEYQAPGL

SEQ ID NO: 12125 - protein, 323 aa, Homo sapiens
  misc_feature (1)...(323): Xaa = X or * as defined in Table 2
AAAAPGNGRASAPRLLLLFLVPLLWAPAAVRAGPDEDLSHRNKEPPAPAQQLQPQPVAVQGPEPARVEKIFTPAAPVHTNTEDPATQTNLGFIHAFVAAISVIIVSELGDRTFVIAAIMAMRYNRPGPCWAGAMLCLAGLMTCLFSVLFGYATTVIPRGLYILMFQPVLFAIFGIRMLREGLKMSPDEGQEELEEVQAELKKKDEEFQRTKLLNGPGDVETGTSITVPQKKWLHFISPIFGQALTLTFLAEWGDRSXLTTIVLAAREDPYGVAVGGTVGHCLCTGLAVIGGRMIAQKISVRTVTIIGGIVFLAFAFSALFISP

SEQ ID NO: 12126 - protein, 145 aa, Homo sapiens
  DOMAIN (18)..(60): Proteasome A-type subunits proteins domain identified by eMATRIX, accession number BL00388B, p-value=1.310e-27, raw score of 31.38
  DOMAIN (1)..(86): Proteasome A-type and B-type domain identified by PFam, accession name proteasome, E-value=2.6e-27, PFam score of 104.0
GVEKLVLSKLYEEGSNKRLFNVDRHVGMAVAGLLADARSLADIAREEASNFRSNFGYNIPLKHLADRVAMYVHAYTLYSAVRPFGCRIYIVHDAVKDKAFELELSWVGELTNGRHEIVPKDIREEAEKYAKESLKEEDESDDDNM

SEQ ID NO: 12127 - protein, 121 aa, Homo sapiens
  misc_feature (1)...(121): Xaa = X or * as defined in Table 2
RDSVVEILFEQDNKEQSVATLILDSLIQCPIDTRKQLAENLEMMFDVGKTQPPLLKRAFSTEKXKFDXTINLASYQIFNQLXANCTKYVGCFVIEDYSGSESILCLLFALIYNSFDFVSLV

SEQ ID NO: 12128 - protein, 143 aa, Homo sapiens; identical to SEQ ID NO: 8541
  DOMAIN (21)..(43): Globins profile domain identified by eMATRIX, accession number BL01033A, p-value=2.929e-17, raw score of 16.94
  DOMAIN (10)..(143): Globin domain identified by PFam, accession name globin, E- value=4.3e-55, PFam score of 196.4

SEQ ID NO: 12129 - protein, 19 aa, Homo sapiens
HLLQHLLYFKFLLQSNVTI

SEQ ID NO: 12130 - protein, 110 aa, Homo sapiens
MVLDCGYRESLVLPIYEGIPVLNCWGALPLGGKALHKELETQLLEQCTVDTSVAKEQSLPSVMGSVPEGVLEDIKARTCFVSDLKRGLKIQAAKFNIDGNNERPSPPPKC

SEQ ID NO: 12131 - protein, 152 aa, Homo sapiens
  DOMAIN (28)..(83): Actins proteins domain identified by eMATRIX, accession number BL00406D, p-value=4.079e-14, raw score of 12.58
  DOMAIN (42)..(79): Actin domain identified by PFam, accession name actin, E- value=0.00015, PFam score of 16.2
  misc_feature (1)...(152): Xaa = X or * as defined in Table 2
MGCRPVGQAGLELLTSARTCFVSDLKRGLKIQAAKFNIDGNNECPIDTRKQLAENLVVIGGTSMLPGFLHRLLAEIRYLVEKPKYKKALGTKTFRIHTPPAKANCVAWLGGKVFVGIXQVEYAMKAVENSSTAIGIRCKDGVVLGVRKISPF

SEQ ID NO: 12132 - protein, 151 aa, Homo sapiens
  misc_feature (1)...(151): Xaa = X or * as defined in Table 2
YIEDDMNPFQGNLEEQRPRKSKTFLXQGAAEQIKHILANFKNYQFFIGENMISDGMVLLLDYVKGWVCPPYMIFFKDGLDMDKMLNKCGKLFWIYHPVIHNWASALSSHTTTRDLRQNWTDCHPGALPFILDWGFYLGVGGHCFYEKPCPW

SEQ ID NO: 12133 - protein, 108 aa, Homo sapiens
  misc_feature (1)...(108): Xaa = X or * as defined in Table 2
RRVSSVTQAGVQWHGLGSLQPPPPGFKLFCLSLPRSQDYRCMPPRPANFCIFLVETGFHPAHXDKLVSNSXPCGPPAPASQSAGITGVTHRAHLPCNVCXLDLFHHHV

SEQ ID NO: 12134 - protein, 953 aa, Homo sapiens
  DOMAIN (150)..(164): LEUCINE-RICH REPEAT SIGNATURE domain identified by eMATRIX, accession number PR00019B, p-value=6.040e-09, raw score of 11.36
  DOMAIN (253)..(784): Immunoglobulin domain identified by PFam, accession name ig, E-value=1.9e-38, PFam score of 128.9
PSGLGNTCIYRRGPHLPNSHRHAARGRISADRRFRHLGHRELHPAPCVPGRGEPHPAPCVPGHGELHPALCVPGRGQLHSVPCIPGRGEPHRCTLCPRSWARCTLHPRDLRFNRIREIQPGAFRRLRNLNTLLLNNNQIKRIPSGAFEDLENLKYLYLYKNEIQSIDRQAFKGLASLEQLRLDSNTLHCDCEILWLADLLKTYAESGNAQAAAICEYPRRIQGRSVATITPEELNCERPRITSEPQDADVTSGNTVYFTCRAEGNPKPEIIWLRNKSLERHAAADTGSLSSRVDLTCLPNKGSLLLCPQTCCGPVKAKTALAAAVRVTEGSPTADHYMRPGSEPHLSSLTCRLALPNIQSHLQATLTCWLAVFLTGISVASNVTSLLFTCFCIKGTKVKLQVGNELSMKTDSRLNLLDDGTLMIQNTQETDQGIYQCMAKNVAGEVKTQEVTLRYFGSPGSFLGNRVCTSSVSVCTATSLQPQNTEVLVGESVTLECSATGHPPPRISWTRGDRTPLPVDPRVNITPSGGLYIQNVVQGDSGEYACSATNNIDSVHATAFIIVQALPQFTVTPQDRVVIEGQTVDFQCEAKGNPPPVIAWTKGGSQLSVDRRHLVLSSGTLRISGVALHDQGQYECQAVNIIGSQKVVAHLTVQPREEEAPLCFLLRESGSPQSLLSSVGPAAQHMPETAPPSFFDVIDSFSWILYICLPVTPVFASIPSDTTVEVGANVQLPCSSQGEPEPAITWNKDGVQVTESGKFHISPEGFLTINDVGPADAGRYECVARNTIGSASSGVSTCCKKMVQKGPRVGPVITNSRRHLVVRSANAFVGWTLSSVLSQTYRDAMRKFPAEEHLPDVSRNGDPFVATSIVEAIATVDRAINSTRTHLFDRYRGAVNTLTLKSLSFRVKGTPSMPVIVLGQGLQSQTEEIKTSALKDQTFQRNADGKPERGPCT

SEQ ID NO: 12135 - protein, 1058 aa, Homo sapiens
  DOMAIN (514)..(535): ANIMAL HAEM PEROXIDASE SIGNATURE domain identified by eMATRIX, accession number PR00457D, p-value=8.200e-20, raw score of 16.81
  DOMAIN (265)..(706): Peroxidase domain identified by PFam, accession name peroxidase, E-value=1.5e-75, PFam score of 264.4
GPCVAVSVSWVCPSHAICEVWSSGLGFLHGHKNPSLGWSCGKLLVAGGPPFIQPSGSAGAGGEWVLVEWVLVERVLVESGCWWRVGAGGVGAGGEWMLVESGCWWSGCWWSGCWWRVGAGGAGAGGAGAGGEWVLVEWVLVESGCWWRVGACGAGAGRVDAGGAGAGGEWVLVERVLVERVLVESGCWWRVGAGGAGAGRVDAGGVGAGGEWVLVERVLVERVLVESYHYNDLVSPQYLNLIANLSGCTAHRRVNNCSDMCFHQKYRTHDGTCNNLQHPMWGASLTAFERLLKSVYENGFNTPRGINPHRLYNGHALPMPRLVSTTLIGTETVTPDEQFTHMLMQWGQFLDHDLDSTVVALSQARFSDGQHCSNVCSNDPPCFSVMIPPNDSRARSGARCMFFVRSSPVCGSGMTSLLMNSVYPREQINQLTSYIDASNVYGSTEHEARSIRDLASHRGLLRQGIVQRSGKPLLPFATGPPTECMRDENESPIPCFLAGDHRANEQLGLTSMHTLWFREHNRIATELLKLNPHWDGDTIYYETRKIVGAEIQHITYQHWLPKILGEVGMRTLGEYHGYDPGINAGIFNAFATAAFRFGHTLVNPLLYRLDENFQPIAQDHLPLHKAFFSPFRIVNEGGIDPLLRGLFGVAGKMRVPSQLLNTELTERLFSMAHTVALDLAAINIQRGRDHGIPPYHDYRVYCNLSAAHTFEDLKNEIKNPEIREKLKRLYGSTLNIDLFPALVVEDLVPGSRLGPTLMCLLSTQFKRLRDGDRLWYENPGVFSPAQLTQIKQTSLARILCDNADNITRVQSDVFRVAEFPHGYGSCDEIPRVDLRVWQDCCEDCRTRGQFNAFSYHFRGRRSLEFSYQEDKPTKKTRPRKIPSVGRQGEHLSNSTSAFSTRSDASGTNDFREFVLEMQKTITDLRTQPRDQVYIPQAAVRVDSVWQVLLPPQPRDQVYIPQAAVRVDSVWQVLLPPQPRDQIKKLESRLSTTECVDAGGESHANNTKWKKDACTICECKDGQVTCFVEACPPATCAVPVNIPGACCPVCLQKRAEEKP

SEQ ID NO: 12136 - protein, 1579 aa, Homo sapiens
  DOMAIN (1006)..(1027): ANIMAL HAEM PEROXIDASE SIGNATURE domain identified by eMATRIX, accession number PR00457D, p-value=8.200e-20, raw score of 16.81
  DOMAIN (758)..(1210): Peroxidase domain identified by PFam, accession name peroxidase, E-value=8.2e-52, PFam score of 185.5
  misc_feature (1)...(1579): Xaa = X or * as defined in Table 2
SRPWWLRASERPSAPSAMAYRSRGPGRRCLLALVLFCAWGTLAVVAQKPGAGCPSRCLCFRTTVRCMHLLLEAVPAVAPQTSILDLRFNRIREIQPGAFRRLRNLNTLLLNNNQIKRIPSGAFEDLENLKYLYLYKNEIQSIDRQAFKGLASLEQLYLHFNQIETLDPDSFQHLPKLERLFLHNNRITHLVPGTFNHLESMKRLRLDSNTLHCDCEILWLADLLKTYAESGNAQAAAICEYPRRIQGRSVATITPEELNCERPRITSEPQDADVTSGNTVYFTCRAEGNPKPEIIWLRNNNELSMKTDSRLNLLDDGTLMIQNTQETDQGIYQCMAKNVAGEVKTQEVTLRYFGSPARPTFVIQPQNTEVLVGESVTLECSATGHPPPRISWTRGDRTPLPVDPRVNITPSGGLYIQNVVQGDSGEYACSATNNIDSVHATAFIIVQALPQFTVTPQDRVVIEGQTVDFQCEAKGNPPPVIAWTKGGSQLSVDRRHLVLSSGTLRISGVALHDQGQYECQAVNIIGSQKVVAHLTVQPRVTPVFASIPSDTTVEVGANVQLPCSSQGEPEPAITWNKDGVQVTESGKFHISPEGFLTINDVGPADAGRYECVARNTIGSASVSMVLSVNVPDVSRNGDPFVATSIVEAIATVDRAINSTRTHLFDSRPRSPNDLLALFRYPRDPYTVEQARAGEIFERTLQLIQEHVQHGLMVDLNGTSYHYNDLVSPQYLNLIANLSGCTAHRRVNNCSDMCFHQKYRTHDGTCNNLQHPMWGASLTAFERLLKSVYENGFNTPRGINPHRLYNGHALPMPRLVSTTLIGTETVTPDEQFTHMLMQWGQFLDHDLDSTVVALSQARFSDGQHCSNVCSNDPPCFSVMIPPNDSRARSGARCMFFVRSSPVCGSGMTSLLMNSVYPREQINQLTSYIDASNVYGSTEHEARSIRDLASHRGLLRQGIVQRSGKPLLPFATGPPTECMRDENESPIPCFLAGDHRANEQLGLTSMHTLWFREHNRIATELLKLNPHWDGDTIYYETRKIVGAEIQHITYQHWLPKILGEVGMRTLGEYHGYDPGINAGIFNAFATAAFRFGHTLVNPLLLPGLDENFQPIAQDHLPLHKAFFSPFGIVNEGGIDPLLRGLFGVAGKMRVPSQLLNTELTERLFSMAHTAALDLAGINIQRGRDHGIPPYHDYRVYCNLSAAHTFEDLKNEIKNPEIREKLKRLYGSTLNIDLFPALVVEDLVPGSRLGPTLMCLLSTQFKRLRDGDRLWYENPGVFSPAQLTQIKQAXLARIIYDNADNITRVQSNVFRVLEFPHGYDSCDEILRVDLRVWQDCCEDCRTRGQFNAFSNHFRDRRSLEFSYQEDKPTKNTRPRKIPSVGRQGEHLSNSTSAFSTRSDASGTNDFREFVLEMQKTITDLRTQIKKLESRLSTTECVDAGAESHANNTKXKKDACTICECKDGQVTCFVEACPPATCAVPVNIPGACCPVCLQKRAEEKAPRLPGEAPSEFCLACAIVRSGGRWQGAADLQTRKHPELRDISLTTSKLGAVYRKAVQEGFPTRAFCGEGRHSRCWKGSRQES

SEQ ID NO: 12137 - protein, 88 aa, Homo sapiens
  misc_feature (1)...(88): Xaa = X or * as defined in Table 2
ADLSAEALXTRREWDDIFKVLKTSSLGQPKILYPSKLSLINEASSSSSSSSSSSREFTTRLVLXEMLKGILHMEAQGQYLPSXKHTKV

SEQ ID NO: 12138 - protein, 54 aa, Homo sapiens
TRVNENQIESKAAYALFYKRQDVARRLLSPAGSSGAPASPACSSPPSSEFMDVN

SEQ ID NO: 12139 - protein, 171 aa, Homo sapiens
  DOMAIN (31)..(53): Globins profile domain identified by eMATRIX, accession number BL01033A, p-value=2.929e-17, raw score of 16.94
  DOMAIN (10)..(96): Globin domain identified by PFam, accession name globin, E- value=3.9e-12, PFam score of 46.8
  misc_feature (1)...(171): Xaa = X or * as defined in Table 2
APSPDAMGHFTEEDKATITSLWGKVNVEDAGGETLGRLLVVYPWTQRFFDSFGNLSSAFCHPWATPKVKAHGKKVLTSLGDAIKHLDDLKGTFAQAXSETALVTKLHVGSXRTFKLPGEMLLGDPFLGNPIFGKRISPLEVGRLSWAERWVTWSWPVALVLPRLPLKLNCP

SEQ ID NO: 12140 - protein, 236 aa, Homo sapiens
  DOMAIN (166)..(188): Ubiquitin carboxyl-terminal hydrolases family 2 proteins domain identified by eMATRIX, accession number BL00972E, p-value= 8.650e-13, raw score of 20.72
  DOMAIN (75)..(204): Ubiquitin carboxyl-terminal hydrolase family domain identified by PFam, accession name UCH-2, E-value=6.8e-10, PFam score of 46.3
  misc_feature (1)...(236): Xaa = X or * as defined in Table 2
EILIIHLKRFSYTKFSREKLDTLVEFPIRSGARERMAGGRQGKEGVYQYXPSPHPQDLDFSEFVIQPQNESNPELYKYDLIAVSNHYGGMRDGHCMCQAVGGACPGGSGQGGDQDLPSEXLGMXASGEGSSVVGRKXTRSEIWTLSEEARKGRRGXLSFPFRTTFACNKDSGQWHYFDDNSVSPVNENQIESKAAYVLFYQRQDVARRLLSPAGSSGAPASPACSSPPSSEFMDVN

SEQ ID NO: 12141 - protein, 1024 aa, Homo sapiens
  DOMAIN (264)..(282): Ubiquitin carboxyl-terminal hydrolases family 2 proteins domain identified by eMATRIX, accession number BL00972A, p-value= 2.500e-20, raw score of 11.93
  DOMAIN (263)..(294): Ubiquitin carboxyl-terminal hydrolases famil domain identified by PFam, accession name UCH-1, E-value=2.3e-15, PFam score of 64.5
  misc_feature (1)...(1024): Xaa = X or * as defined in Table 2
IPLLQLLLRRLWRRHGRWTEDREPQHEELPGLDSQWRQIENGESGRERPLRAGESWFLVEKHWYKQWEAYVQGGDQDSSTFPGCINNATLFQDEINWRLKEGLVEGEDYVLLPARAWHYLVSWYGLEHGQPPIERKVIELPNIQKVEVYPVELLLVRHNDLGKSHTVQFSHTDSIGLVLRTARERFLVEPQEDTRLWAKNSEGSLDRLYDTHITVLDAALETGQLIIMETRKKDGTWPSAQLHVMNNNMSEEDEDFKGQPGICGLTNLGNTCFMNSALQCLSNVPQLTEYFLNNCYLEELNFRNPLGMKGEIAEAYADLVKQAWSGHHRSIVPHVFKNKVGHFASQFLGYQQHDSQELLSFLLDGLHEDLNRVKKKEYVELCDAAGRPDQEVAQEAWQNHKRRNDSVIVDTFHGLFKSTLVCPDCGNVSVTFDPFCYLSVPLPISHKRVLEVFFIPMDPRRKPEQHRLVVPKKGKISDLCVALSKHTGISPERMMVADVFSHRFYKLYQLEEPLSSILDRDDIFVYEVSGRIEAIEGSREDIVVPVYLRERTPARDYNNSYYGLMLFGHPLLVSVPRDRFTWEGLYNVLMYRLSRYVTKPNSDDEDDGDEKEDDEEDKDDVPGPSTGGSLRDPEPEQAGPSSGVTNRCPFLLDNCLGTSQWPPRRRRKQLVQLQTVNSNGHNRLHHSPCTKSNAKPVHCYSTWKPEMKKRYYDEXEGEGLREGNAFRRGYVXRKAPVRLQECIELFTTVEPPPFGGKEREKPWYCPSCKQHQLATKKLDLWMLPEILIIHLKTFFPYTQVLPEKKLEHPSWKFPYPGTLDFSXEFVIQAHQNEVEIRELYKYDLIAVSNHYGGMRDGTLTQHLACNKDSGQWHLLLIDNSVFPLFNXGIQIRVPRAAYVLFYQRQDTLARRLLSPCRAHLAPSVLPCLHAPSPQLVSSCDVILRALGPAPEKKKKKALSAISLLVSAPLLLFVLGAPARHCRLSRGYCSPVPLNRSLPGKNRSCLLLAVRAPPCVCPSSSDPPF

SEQ ID NO: 12142 - protein, 528 aa, Homo sapiens
  DOMAIN (146)..(165): FIBRONECTIN TYPE III REPEAT SIGNATURE domain identified by eMATRIX, accession number PR00014C, p-value=2.800e-12, raw score of 15.44
  DOMAIN (7)..(406): Fibronectin type III domain identified by PFam, accession name fn3, E-value=6e-50, PFam score of 179.3
MTISTAIPAPTDLKFTQVTPTSLSAQWTPPNVQLTGYRVRVTPKEKTGPMKEINLAPDSSSVVVSGLMVATKYEVSVYALKDTLTSRPAQGVVTTLENVSPPRRARVTDATETTITISWRTKTETITGFQVDAVPANGQTPIQRTIKPDVRSYTITGLQPGTDYKIYLYTLNDNARSSPVVIDASTGLEPGTEYTIYVIALKNNQKSEPLIGRKKTDELPQLVTLPHPNLHGPEILDVPSTVQKTPFVTHPGYDTGNGIQLPGTSGQQPSVGQQMIFEEHGFRRTTPPTTATPIRHRPRPYPPNVGEEIQIGHIPREDVDYHLYPHGPGLNPNASTGQEALSQTTISWAPFQDTSEYIISCHPVGTDEEPLQFRVPGTSTSATLTGLTRGATYNVIVEALKDQQRHKVREEVVTVGNSVNEGLNQPTDDSCFDPYTVSHYAVGDEWERMSESGFKLLCQCLGFGSGHFRCDSSRWCHDNGVNYKIGEKWDRQGENGQMMSCTCLGNGKGEFEFTRNSGLGSSIWESLI

SEQ ID NO: 12143 - protein, 1173 aa, Homo sapiens
  DOMAIN (367)..(404): Type II fibronectin collagen-binding domain proteins domain identified by eMATRIX, accession number BL00023, p-value=8.920e-33, raw score of 24.31
  DOMAIN (52)..(553): Fibronectin type I domain identified by PFam, accession name fn1, E-value=1.7e-144, PFam score of 493.4
MLRGPGPGLLLLAVQCLGTAVPSTGASKSKRQAQQMVQPQSPVAVSQSKPGCYDNGKHYQINQQWERTYLGNALVCTCYGGSRGFNCESKPEAEETCFDKYTGNTYRVGDTYERPKDSMIWDCTCIGAGRGRISCTIANRCHEGGQSYKIGDTWRRPHETGGYMLECVCLGNGKGEWTCKPIDRCNDQDTRTSYRIGDTWSKKDNRGNLLQCICTGNGRGEWKCERHTSVQTTSSGSGPFTDVRAAVYQPQPHPQPPPYGHCVTDSGVVYSVGMQWLKTQGNKQMLCTCLGNGVSCQETAVTQTYGGNSNGEPCVLPFTYNGRTFYSCTTEGRQDGHLWCSTTSNYEQDQKYSFCTDHTVLVQTRGGNSNGALCHFPFLYNNHNYTDCTSEGRRDNMKWCGTTQNYDADQKFGFCPMAAHEEICTTNEGVMYRIGDQWDKQHDMGHMMRCTCVGNGRGEWTCIAYSQLRDQCIVDDITYNVNDTFHKRHEEGHMLNCTCFGQGRGRWKCDPVDQCQDSETGTFYQIGDSWEKYVHGVRYQCYCYGRGIGEWHCQPLQTYPSSSGPVEVFITETPSQPNSHPIQWNAPQPSHISKYILRWRPKNSVGRWKEATIPGHLNSYTIKGLKPGVVYEGQLISIQQYGHQEVTRFDFTTTSTSTPVTSNTVTGETTPFSPLVATSESVTEITASSFVVSWVSASDTVSGFRVEYELSEEGDEPQYLDLPSTATSVNIPDLLPGRKYIVNVYQISEDGEQSLILSTSQTTAPDAPPDTTVDQVDDTSIVVRWSRPQAPITGYRIVYSPSVEGSSTELNLPETANSVTLSDLQPGVQYNITIYAVEENQESTPVVIQQETTGTPRSDTVPSPRDLQFVEVTDVKVTIMWTPPESAVTGYRVDVIPVNLPGEHGQRLPISRNTFAEVTGLSPGVTYYFKVFAVSHGRESKPLTAQQTTKLDAPTNLQFVNETDSTVLVRWTPPRAQITGYRLTVGLTRRGQPRQYNVGPSVSKYPLRNLQPASEYTVSLVAIKGNQESPKATGVFTTRHHSPRKMSGMNTPWRTLHMHRCSLSHPGFITHSERLCVPKIHCEWLYVLITHYECTCPLPTMSGCACPSPAVGGCASVTCRGWLCMYVTRRGWLCVSVTCRGWLCVSVACHGWLCMFCPHHHLGLQHFALGHGG

SEQ ID NO: 12144 - protein, 223 aa, Homo sapiens
  DOMAIN (15)..(25): FIBRONECTIN TYPE III REPEAT SIGNATURE domain identified by eMATRIX, accession number PR00014A, p-value=9.591e-09, raw score of 8.22
  DOMAIN (1)..(79): Fibronectin type III domain identified by PFam, accession name fn3, E-value=8.7e-21, PFam score of 82.5
LDAPTNLQFVNETDSTVLVRWTPPRAQITGYRLTVGLTRRGQPRQYNVGPSVSKYPLRNLQPASEYTVSLVAIKGNQESPKATGVFTTRHHSPRKMSGMNTPWRTLHMHRCSLSHPGFITHSERLCVPKIHCEWLYVLITHYECTCPLPTMSGCACPSPAVGGCASVTCRGWLCMYVTRRGWLCVSVTCRGWLCVSVACHGWLCMFCPHHHLGLQHFALGHGG

SEQ ID NO: 12145 - protein, 793 aa, Homo sapiens
  DOMAIN (706)..(718): FIBRONECTIN TYPE I REPEAT SIGNATURE domain identified by eMATRIX, accession number PR00012A, p-value=3.250e-14, raw score of 9.68
  DOMAIN (39)..(588): Fibronectin type III domain identified by PFam, accession name fn3, E-value=3.8e-95, PFam score of 329.5
QTEMTIEGLQPTVEYVVSVYAQNPSGESQPLVQTAVTNIDRPKGLAFTDVDVDSIKIAWESPQGQVSRYRVTYSSPEDGIHELFPAPDGEEDTAELQGLRPGSEYTVSVVALHDDMESQPLIGTQSTAIPAPTDLKFTQVTPTSLSAQWTPPNVQLTGYRVRVTPKEKTGPMKEINLAPDSSSVVVSGLMVATKYEVSVYALKDTLTSRPAQGVVTTLENVSPPRRARVTDATETTITISWRTKTETITGFQVDAVPANGQTPIQRTIKPDVRSYTITGLQPGTDYKIYLYTLNDNARSSPVVIDASTAIDAPSNLRFLATTPNSLLVSWQPPRARITGYIIKYEKPGSPPREVVPRPRPGVTEATITGLEPGTEYTIYVIALKNNQKSEPLIGRKKTDELPQLVTLPHPNLHGPEILDVPSTVQKTPFVTHPGYDTGNGIQLPGTSGQQPSVGQQMIFEEHGFRRTTPPTTATPIRHRPRPYPPNVGEEIQIGHIPREDVDYHLYPHGPGLNPNASTGQEALSQTTISWAPFQDTSEYIISCHPVGTDEEPLQFRVPGTSTSATLTGLTRGATYNIIVEALKDQQRHKVREEVVTVGNSVNEGLNQPTDDSCFDPYTVSHYAVGDEWERMSESGFKLLCQCLGFGSGHFRCDSSRWCHDNGVNYKIGEKWDRQGENGQMMSCTCLGNGKGEFKCDPHEATCYDDGKTYHVGEQWQKEYLGAICSCTCFGGQRGWRCDNCRRPGGEPSPEGTTGQSYNQYSQRYHQRTNTNVNCPIECFMPLDVQADREDSRE

SEQ ID NO: 12146 - protein, 782 aa, Homo sapiens
  DOMAIN (629)..(648): FIBRONECTIN TYPE III REPEAT SIGNATURE domain identified by eMATRIX, accession number PR00014C, p-value=4.857e-13, raw score of 15.44
  DOMAIN (35)..(660): Fibronectin type III domain identified by PFam, accession name fn3, E-value=4.4e-170, PFam score of 578.4
TFDNLSPGLEYNVSVYTVKDDKESVPISDTIIPAVPPPTDLRFTNIGPDTMRVTWAPPPSIDLTNFLVRYSPVKNEEDVAELSISPSDNAVVLTNLLPGTEYVVSVSSVYEQHESTPLRGRQKTGLDSPTGIDFSDITANSFTVHWIAPRATITGYRIRHHPEHFSGRPREDRVPHSRNSITLTNLTPGTEYVVSIVALNGREESPLLIGQQSTVSDVPRDLEVVAATPTSLLISWDAPAVTVRYYRITYGETGGNSPVQEFTVPGSKSTATISGLKPGVDYTITVYAVTGRGDSPASSKPISINYRTEIDKPSQMQVTDVQDNSISVKWLPSSSPVTGYRVTTTPKNGPGPTKTKTAGPDQTEMTIEGLQPTVEYVVSVYAQNPSGESQPLVQTAVTTIPAPTDLKFTQVTPTSLSAQWTPPNVQLTGYRVRVTPKEKTGPMKEINLAPDSSSVVVSGLMVATKYEVSVYALKDTLTSRPAQGVVTTLENVSPPRRARVTDATETTITISWRTKTETITGFQVDAVPANGQTPIQRTIKPDVRSYTITGLQPGTDYKIYLYTLNDNARSSPVVIDASTAIDAPSNLRFLATTPNSLLVSWQPPRARITGYIIKYEKPGSPPREVVPRPRPGVTEATITGLEPGTEYTIYVIALKNNQKSEPLIGRKKTVQKTPFVTHPGYDTGNGIQLPGTSGQQPSVGQQMIFEEHGFRRTTPPTTATPIRHRPRPYPPNVGQEALSQTTISWAPFQDTSEYIISCHPVGTDEEPLQFRVPGTSTSATLT

SEQ ID NO: 12147 - protein, 2446 aa, Homo sapiens
  DOMAIN (413)..(450): Type II fibronectin collagen-binding domain proteins domain identified by eMATRIX, accession number BL00023, p-value=8.920e-33, raw score of 24.31
  DOMAIN (608)..(2241): Fibronectin type III domain identified by PFam, accession name fn3, E-value=0, PFam score of 1157.5
MLRGPGPGLLLLAVLCLGTAVPSTGASKSKRQAQQMVQPQSPVAVSQSKPGCYDNGKHYQINQQWERTYLGNVLVCTCYGGSRGFNCESKPEAEETCFDKYTGNTYRVGDTYERPKDSMIWDCTCIGAGRGRISCTIANRCHEGGQSYKIGDTWRRPHETGGYMLECVCLGNGKGEWTCKPIAEKCFDHAAGTSYVVGETWEKPYQGWMMVDCTCLGEGSGRITCTSRNRCNDQDTRTSYRIGDTWSKKDNRGNLLQCICTGNGRGEWKCERHTSVQTTSSGSGPFTDVRAAVYQPQPHPQPPPYGHCVTDSGVVYSVGMQWLKTQGNKQMLCTCLGNGVSCQETAVTQTYGGNLNGEPCVLPFTYNGRTFYSCTTEGRQDGHLWCSTTSNYEQDQKYSFCTDHTVLVQTQGGNSNGALCHFPFLYNNHNYTDCTSEGRRDNMKWCGTTQNYDADQKFGFCPMAAHEEICTTNEGVMYRIGDQWDKQHDMGHMMRCTCVGNGRGEWTCIAYSQLRDQCIVDDITYNVNDTFHKRHEEGHMLNCTCFGQGRGRWKCDPVDQCQDSETGTFYQIGDSWEKYVHGVRYQCYCYGRGIGEWHCQPLQTYPSSSGPVEVFITETPSQPNSHPIQWNAPQPSHISKYILRWRPKNSVGRWKEATIPGHLNSYTIKGLKPGVVYEGQLISIQQYGHQEVTRFDFTTTSTSTPVTSNTVTGETTPFSPLVATSESVTEITASSFVVSWVSASDTVSGFRVEYELSEEGDEPQYLDLPSTATSVNIPDLLPGRKYIVNVYQISEDGEQSLILSTSQTTAPDAPPDPTVDQVDDTSIVVRWSRPQAPITGYRIVYSPSVEGSSTELNLPETANSVTLSDLQPGVQYNITIYAVEENQESTPVVIQQETTGTPRSDTVPSPRDLQFVEVTDVKVTIMWTPPESAVTGYRVDVIPVNLPGEHGQRLPISRNTFAEVTGLSPGVTYYFKVFAVSHGRESKPLTAQQTTKLDAPTNLQFVNETDSTVLVRWTPPRAQITGYRLTVGLTRRGQPRQYNVGPSVSKYPLRNLQPASEYTVSLVAIKGNQESPKATGVFTTLQPGSSIPPYNTEVTETTIVITWTPAPRIGFKLGVRPSQGGEAPREVTSDSGSIVVSGLTPGVEYVYTIQVLRDGQERDAPIVNKVVTPLSPPTNLHLEANPDTGVLTVSWERSTTPDITGYRITTTPTNGQQGNSLEEVVHADQSSCTFDNLSPGLEYNVSVYTVKDDKESVPISDTIIPEVPQLTDLSFVDITDSSIGLRWTPLNSSTIIGYRITVVAAGEGIPIFEDFVYSSVGYYTVTGLEPGIDYDISVITLINGGESAPTTLTQQTAVPPPTDLRFTNIGPDTMRVTWAPPPSIDLTNFLVRYSPVKNEEDVAELSISPSDNAVVLTNLLPGTEYVVSVSSVYEQHESTPLRGRQKTGLDSPTGIDFSDITANSFTVHWIAPRATITGYRIRHHPEHFSGRPREDRVPHSRNSITLTNLTPGTEYVVSIVALNGREESPLLIGQQSTVSDVPRDLEVVAATPTSLLISWDAPAVTVRYYRITYGETGGNSPVQEFTVPGSKSTATISGLKPGVDYTITVYAVTGRGDSPASSKPISINYRTEIDKPSQMQVTDVQDNSISVKWLPSSSPVTGYRVTTTPKNGPGPTKTKTAGPDQTEMTIEGLQPTVEYVVSVYAQNPSGESQPLVQTAVTNIDRPKGLAFTDVDVDSIKIAWESPQGQVSRYRVTYSSPEDGIHELFPAPDGEEDTAELQGLRPGSEYTVSVVALHDDMESQPLIGTQSTAIPAPTDLKFTQVTPTSLSAQWTPPNVQLTGYRVRVTPKEKTGPMKEINLAPDSSSVVVSGLMVATKYEVSVYALKDTLTSRPAQGVVTTLENVSPPRRARVTDATETTITISWRTKTETITGFQVDAVPANGQTPIQRTIKPDVRSYTITGLQPGTDYKIYLYTLNDNARSSPVVIDASTAIDAPSNLRFLATTPNSLLVSWQPPRARITGYIIKYEKPGSPPREVVPRPRPGVTEATITGLEPGTEYTIYVIALKNNQKSEPLIGRKKTDELPQLVTLPHPNLHGPEILDVPSTVQKTPFVTHPGYDTGNGIQLPGTSGQQPSVGQQMIFEEHGFRRTTPPTTATPIRHRPRPYPPNVGQEALSQTTISWAPFQDTSEYIISCHPVGTDEEPLQFRVPGTSTSATLTGLTRGATYNIIVEALKDQQRHKVREEVVTVGNSVNEGLNQPTDDSCFDPYTVSHYAVGDEWERMSESGFKLLCQCLGFGSGHFRCDSSRWCHDNGVNYKIGEKWDRQGENGQMMSCTCLGNGKGEFKCDPHEATCYDDGKTYHVGEQWQKEYLGAICSCTCFGGQRGWRCDNCRRPGGEPSPEGTTGQSYNQYSQRYHQRTNTNVNCPIECFMPLDVQADREDSRE

SEQ ID NO: 12148 - protein, 2359 aa, Homo sapiens
  DOMAIN (386)..(423): Type II fibronectin collagen-binding domain proteins domain identified by eMATRIX, accession number BL00023, p-value=8.920e-33, raw score of 24.31
  DOMAIN (583)..(2149): Fibronectin type III domain identified by PFam, accession name fn3, E-value=9.7e-275, PFam score of 926.1
  misc_feature (1)...(2359): Xaa = X or * as defined in Table 2
KSKRQAQQMVQPQSPVAVSQSKPGCYDNGKHYQINQQWERTYLGNVLVCTCYGGSRGFNCESKPEAEETCFDKYTGNTYRVGDTYERPKDSMIWDCTCIGAGRGRISCTIANRCHEGGQSYKIGDTWRRPHETGGYMLECVCLGNGKGEWTCKPIAEKCFDHAAGTSYVVGETWEKPYQGWMMVDCTCLGEGSGRITCTSRNRCNDQDPRASYRIGDPWSNKVHRGNLLQCICTGNARGEWKCERHTSVQTTSSGSGPFTDVRAAVYQPQPHPQPPPYGHCVTDSGVVYSVGMQWLKTQGNKQMLCTCLGNGVSCQETAVNQNYRGNSNGEPCVLPFTYNGRTFYSCTTEGRQDGHLWCSTTSNYEQDQKYSFCTDHTVLVQTQGGNSNGALCHFPFLYNNHNYTDCTSEGRRDNMKWCGTTQNYDADQKFGFCPMAAHEEICTTNEGVMYRIGDQWDKQHDMGHMMRCTCVGNGRGEWTCIAYSQLRDQCIVDDITYNVNDTFHKRHEEGHMLNCTCFGQGRGRWKCDPVDQCQDSETGTFYQIGDSWEKYVHGVRYQCYCYGRGIGEWHCQPLQTYPSSSGPVEVFITETPSQPNFPPIQWNAPQPSHISKYILRWRPKNSVGRWKEATIPGHLNSYTIKGLKPGVWVYEGQLISIQQYGHQELTRFDFTTTSTSTPVTSNTVTGETTPFSPLVATSESVTEITASSFVVSWVSASDTVSGFRVEYELSEEGDEPQYLDLPSTATSVNIPDLLPGRKYIVNVYQISEDGEQSLILSTSQTTAPDAPPDPTVDQVDDTSIVVRWSRPQAPITGYRIVYSPSVEGSSTELNLPETANSVTLSDLQPGVQYNITIYAVEENQESTPVVIQQETTGTPRSDTVPSPRDLQFVEVTDVKVTIMWTPPESAVTGYRVDVIPVNLPGEHGQRLPLSRNTFAEVTGLSPGVTYYFKVFGQXATGRESKPLTAQQTTKLDAPTNLQFVNGTDSTVLVLRWTPLRAQITGYRLTVGLTRRGQPRQYNVGPSVSKYPLRNLQPASEYTVSLVAIKGNQENPKATGVFTTLQPGSSIPPYNTEVTETTIVITWTHAPRIGFKLGVRPSNPGEAPREVTSDSGSIVVSGLTPGVEYVYTIQVLRDGQDRDAPIVNKVVTPLSPPTNLHLEANPDTGVLTVSWERSTTPDITGYRITTTPTNGQQGNSLEEVVHADQSSCTFDNLEVPGLEYNVSVYTVKDDKESVPISDTIIPAVPPPTDLRFTNIGPDTMRVTWAPPPSIDLTNFLVRYSPVKNEEDVAELSISPSDNAVVLTNLLPGTEYVVSVSSVYEQHESTPLRGRQKTGLDSPTGIDFSDITANSFTVHWIAPRATITGYRIRHHPEHFSGRPREDRVPHSRNSITLTNLTPGTEYVVSIVALNGREESPLLIGQQSTVSDVPRDLEVVAATPTSLLISWDAPAVTVRYYRITYGETGGNSPVQEFTVPGSKSTATISGLKPGVDYTITVYAVTGRGDSPASSKPISINYRTEIDKPSQMQVTDVQDNSISVKWLPSSSPVTGYRVTTTPKNGPGPTKTKTAGPDQTEMTIEGLQPTVEYVVSVYAQNPSGESQPLVQTAVTNIDRPKGLAFTDVDVDSIKIAWESPQGQVSRYRVTYSSPEDGIHELFPAPDGEEDTAELQGLRPGSEYTVSVVALHDDMESQPLIGTQSTAIPAPTDLKFTQVTPTSLSAQWTPPNVQLTGYRVRVTPKEKTGPMKEINLAPDSSSVVVSGLMVATKYEVSVYALKDTLTSRPAQGVVTTLENVSPPRRARVTDATETTITISWRTKTXTITLGFQVDAVPANGQTPIQRTIKPDVRSYTITGLQPGTDYKIYLYTLNDNARSSPVVIDASTAIDAPSNLRFLATTPNSLLVSWQPPRARITGYIIKYEKPGSPPREVVPRPRPGVTEATITGLEPGTEYTIYVIALKNNQKSEPLIGRKKTDELPQLVTLPHPNLHGPEILDVPSTVQKTPFVTHPGYDTGNGIQLPGTSGQQPSVGQQMIFEEHGFRRTTPPTTATPIRHRPRPYPPNVGQEALSQTTMSWAPALYTAEYIISCHPGGSDEEPLQFMDTGTATSATLTGLTRGATYNMIMEALKDQHRHKVREEVVTVGNSVNEGLNQPTDDSCFDPYTVSHYAVGDEWERMSESGFKLLCQCLGFGSGHFRCDSSRMWCHDNGVNYKIGEKWDRQGENGQMMSCTCLGNGKGEFKCDPHEATCYDDGKTYHVGEQWQKEYLGAICSCTCFGGQRGWPCVDNCRRPGGEPSPEGTTGQSYNQYSQRYHQRTTHNFKLPQLKCSWPLDVQADRRRFPESKSSFPIQRNQACLSAKIHLKLE

SEQ ID NO: 12149 - protein, 129 aa, Homo sapiens
  DOMAIN (43)..(64): 3-hydroxyisobutyrate dehydrogenase proteins domain identified by eMATRIX, accession number BL00895A, p-value=4.649e-18, raw score of 12.61
SMAASLRLLGAASGLRYWSRRLRPAAGSFAAVCSRSVASKTPVGFIGLGNMGNPMAKNLMNLGIRLGLDPKLLAKILNMSSGRCWSSDTYNPVPGVMDGVPSANNYQGGFGTTLMAKDLGLAQDSATST

SEQ ID NO: 12150 - protein, 44 aa, Homo sapiens
ERKKKKMATVQKGMPHKYYHGKTGSYNVIQHAVGNAVTNRTRGS

SEQ ID NO: 12151 - protein, 184 aa, Homo sapiens
  DOMAIN (82)..(103): 3-hydroxyisobutyrate dehydrogenase proteins domain identified by eMATRIX, accession number BL00895A, p-value=1.973e-18, raw score of 12.61
ADALGRPTRPASQSRCTRSQSVGPSGFGGGHRGESGRAYVWQPPYGSSEHASGLRYWSRRLRPAAGSFAAVCSRSVASKTPVGFIGLGNMGNPMAKNLMKHGYPLIIYDVFPDACKEFQDAGEQVVSSPADVAEKADRIITMLPTSINAIEAYSGANGILKKVKKGSLLIDSSTIDPAVSKELA

SEQ ID NO: 12152 - protein, 372 aa, Homo sapiens
  DOMAIN (183)..(222): 3-hydroxyisobutyrate dehydrogenase proteins domain identified by eMATRIX, accession number BL00895B, p-value=7.061e-22, raw score of 21.14
  misc_feature (1)...(372): Xaa = X or * as defined in Table 2
MGNPMAKNLMKHGYPLIIYDVFPDACKEFQDAGEQLCPNLDVNHPFVQRLHAADTPWPISHLLAASVIGCCDIACLFSGRVSISSLCVTISSQADEVRAKENKPIPQHPTKIAEMLVVSSPADVAEKADRIITMLPTSINAIEAYSGANGILKKVKKGSLLIDSSTIDPAVSKELAKEVEKMGAVFMDAPVSGGVGAARSGNLTFMVGGVEDEFAAAQELLGCMGSNVVYCGAVGTGQAAKICNNMLLAISMIGTAEAMNLGIKSXGFDPKLLAKILNMSSGRCWSKXHFINPVPGVMDGVPSANXLFRVDFGTTLHWLKDLGLAQDSATSTKSPILLGSLAHQIYRMMCAKGYSKKDFSSVFQFLREEETF

SEQ ID NO: 12153 - protein, 143 aa, Homo sapiens
  DOMAIN (93)..(143): Ribosomal protein L30 proteins domain identified by eMATRIX, accession number BL00634, p-value=2.636e-23, raw score of 34.38
  DOMAIN (88)..(134): Ribosomal protein L30p/L7e domain identified by PFam, accession name Ribosomal_L30, E-value=2.3e-20, PFam score of 72.0
  misc_feature (1)...(143): Xaa = X or * as defined in Table 2
MEGVEEKKKEVPAVPETLKKKRRNFAELKIKRLRKKFAQKMLRKARRKLIYEKAKHYHKEYRQMYRTEIRMARMARKAGNFYVPAEPKLAFVIRXRGINGVSPKVRKVLQLLRLRQIFNGTFVKLNKASINMLRDCRAIYCMG

SEQ ID NO: 12154 - protein, 252 aa, Homo sapiens
  misc_feature (1)...(252): Xaa = X or * as defined in Table 2
RRVPAVPETLKKKRRNFAELKIKRLRKKFAQQMLRKARRKLIYEKAKHYHKEYRQMYRTXNFEWARMGKKKLANFYVPAEPQIWRFVIRIRGINGVSPKGSERFFQLLRLRQIFNGNLLXKLNQGFRFNMAEDFXSPYIAMGGTPNLKVSKMNXSYKRGLWAKSNKKRIALTDNALIARSLGKIRHILAWEDLIHEIYTVGKRFKEANNFLWPFKLSFSTKVEMKKKTTHFVEGGDAGNREDQINRLIRRMN

SEQ ID NO: 12155 - protein, 64 aa, Homo sapiens
  DOMAIN (21)..(42): Somatomedin B domain proteins domain identified by eMATRIX, accession number BL00524A, p-value=4.246e-16, raw score of 9.65
  DOMAIN (10)..(46): Somatomedin B domain identified by PFam, accession name Somatomedin_B, E-value=0.0058, PFam score of 18.5
EQGFDGHLASWISLKDTAKWKNGDELCSYYQSCCTDYTAECKPQVTRGDVFTMPEDEYTVYDDG

SEQ ID NO: 12156 - protein, 503 aa, Homo sapiens
  DOMAIN (458)..(497): Somatomedin B domain proteins domain identified by eMATRIX, accession number BL00524C, p-value=4.717e-25, raw score of 23.93
  DOMAIN (25)..(69): Somatomedin B domain identified by PFam, accession name Somatomedin_B, E-value=1.2e-14, PFam score of 62.1
  misc_feature (1)...(503): Xaa = X or * as defined in Table 2
ARSPAMAPLRPLLILALLAWVALADQESCKGRCTEGFNVDKKCQRDELCSYYQSCCTDYTAECKPQVTRGDVFTMPEDEYTVYERLGEEKNNATVHEQVGGPSLTSDLQAQSKGNPEQTPVLKPEEEAPAPEVGASKPEGIDSRPETLHPGRPQPPAEEELCSGKPFDAFTDLKNGSLFAFRGQYCYELDEKAVRPGYPKLIRDVWGIEGPIDAAFTRINLFRGRPYLFKGXQYWRAFEDGVLGPWIYPRNISWTAFDGHSPGQTWDAALGLPCPLAYSGRERVYFFQRGKQYWESYQFPGTSPVQEECEGSSLSAVFEHFAMMQRDSWEDIFELLFWGAERSGWVTRQPQFHLAGEWHGVPGQVDAAMGGRILHLQGMATRPLLWPKKKRFRHRNRKGYRSQRAHSRGRXPETPRRPSRAMWLSFVLPSEESNLGANNYDDYRMDLALCLPTCEPIQECFFFSFGDKYYRVNLRTRRVDTVDPPYPRSIAQYWLGCPAPGHL

SEQ ID NO: 12157 - protein, 99 aa, Homo sapiens
MRSFGQLTLCPRNGTVTGKWRGSHVVGLLTTLNFGDGPDRNKTRTFQATVLGSQMGLKGGAGSVWLQAAGLGLLPASLLWPSLLCHCYVLPPAPGVPLV

SEQ ID NO: 12158 - protein, 55 aa, Homo sapiens
  misc_feature (1)...(55): Xaa = X or * as defined in Table 2
MPQPPTLGQEMTGPSQPWTGKGGLPGPXQLRAKAQEVDSHLGRKKIKQQNRSKSC

SEQ ID NO: 12159 - protein, 102 aa, Homo sapiens
  misc_feature (1)...(102): Xaa = X or * as defined in Table 2
VRWNSAAPLVTSRGAPASARPRGQALPGGSAPSAPHGQLPGRAQPAPVSGPPPTSGLCHFDPAAPWPPGLGLGMLPPHPQDWPAQPXHPPGLGLFFEIFSAS

SEQ ID NO: 12160 - protein, 147 aa, Homo sapiens
  DOMAIN (14)..(42): !!!! PROTEIN ALU SUBFAMILY WARNING ENTRY NUCLEAR PHOSPHO domain identified by eMATRIX, accession number PD02454B, p-value= 1.614e-11, raw score of 11.61
  misc_feature (1)...(147): Xaa = X or * as defined in Table 2
SQYFGTLRRVDHLRSGVRDQPGQLGKTPSXPQVIHPPQCPKVLGLQYYHFLFFLRRSLDSVAQAGVQWRDLGSLQRPPPGFTPFSCLSLPSSWDYRRPPPRLANFFVFSVETGFTVSARMVSISXPRDPPASASQSAGDTGVSQAPV

SEQ ID NO: 12161 - protein, 155 aa, Homo sapiens
DHSSSPAREQNWMENEFDELTEVGFRRWVITNSSELKKHVLTQCKEAKNLEKRLGELLTRITSLEKNINDLMELKNTARELHEAYTSINSWINQAEERLSEIEDQLNEIKREDKITEKMKNSTTVRVAASMQSKLLQGVAEEGPLRLTRSASFSA

SEQ ID NO: 12162 - protein, 38 aa, Homo sapiens
  misc_feature (1)...(38): Xaa = X or * as defined in Table 2
ARAEMLIVQYILPRLTHCAIFTILFIFSLLTXVMLLSS

SEQ ID NO: 12163 - protein, 47 aa, Homo sapiens; identical to SEQ ID NO: 10263
  misc_feature (1)...(47): Xaa = X or * as defined in Table 2

SEQ ID NO: 12164 - protein, 222 aa, Homo sapiens
  misc_feature (1)...(222): Xaa = X or * as defined in Table 2
GIDTILTLNQNXSLKTRQXFTLIIFIFFFFLRWSLALSPRPDCGLQWRDLGSLQAPLPGFTPFSCLSLPSSWDYRCPPPRPANFFCNFFFSRDGGFTVLARMVSISXPQCDPPTLASQRAGITGLSHCTRLFFFXWMESPSVTQAGIQWHDLGSLQPMPPQFRXFSWLSLPSSQDYRCMPPCQANFCIFSRDEVSPCXPGWSGSPDLVIHLPWPPKVLGLHA

SEQ ID NO: 12165 - protein, 99 aa, Homo sapiens
TSQEPLRTSARLLWAHSTDGRRGWSTRICRPSTDFPFMAIMASLASSMFSKVTNPNPRDLWSPCLSQPPLQRSVRTLRRPAPATAHWCQNSASNKSLPS

SEQ ID NO: 12166 - protein, 78 aa, Homo sapiens
PRSPPPLENPRPRPRPPRKKPRPPAEPPRYPRDRLSDDLPAWSTRICRPSTDFPFMAIMASLASSMFSKVRDGRGGGR

SEQ ID NO: 12167 - protein, 51 aa, Homo sapiens
MAGAFRRRFASEVRAQGLESLLEHGLRCAGSLRGGQSLPTTMWSPVKVGFE

SEQ ID NO: 12168 - protein, 231 aa, Homo sapiens
  DOMAIN (129)..(162): PROLINE-RICH PROTEIN 3 domain identified by eMATRIX, accession number DM00215, p-value=5.018e-10, raw score of 19.43
  misc_feature (1)...(231): Xaa = X or * as defined in Table 2
VFFFFFSGCTRGPLFESDFHRAPHRCGQGLAAPXAAGAPQPRAPGETRGPEPAPHWRSASGDKPPGQAAPPALVPGEGPSWDSDPRGHRCSQATLPRVLAGPLQPXLSXLSLXDPPELRSLXPPLXLRLLXXSLEPPXPPLLDSNRFPPXPRSPPPLENPRPRPRPPRKKPRPPAEPPRYPTESVSDDLPAWSTRISVHLQTSHSWPSWASLASSMFFKVTKPNSRELWSS

SEQ ID NO: 12169 - protein, 136 aa, Homo sapiens
  misc_feature (1)...(136): Xaa = X or * as defined in Table 2
FCCCFTSSEHSLLAYGSCSPRRTEVLCAQQNPSETQAAPLASYMWKXPCNSRLKGPGPGLGEGWPESRMTSGVTVPGGTSPGTRAGGSPCPGGLSPEALRQXGAGSGPRVSPGAPGCGAPAAYGAASPCPQRCGAL

SEQ ID NO: 12170 - protein, 184 aa, Homo sapiens
  misc_feature (1)...(184): Xaa = X or * as defined in Table 2
FFFFFFLGAHVALYSNPTFTGLHIVVGKDWPPPXAAGAPQPRAPGETRGPEPAPHWRSASGDKPPGASGCLQLLFQGEVPPGDSXPQRSSLALRPPFPRVLGPGPFQPAKAKQRYSQRPPQGSQLAPPGPPRKQPQPLRKVSGXSGGCDLRLRHRPACPGRVCTLAQLEPATRMGWSYVGQCGL

SEQ ID NO: 12171 - protein, 188 aa, Homo sapiens
  misc_feature (1)...(188): Xaa = X or * as defined in Table 2
RCLFILSFFTGRRTHTPXPPLPGLRTGFPPXPRSPPPSREPTGPRPRPPREESPGPRQXPPRVPHGIGLSDDLPAWSYSGSGRPSTGLPIPWPSWHPXRRQCSQRXQTQIPEISGSPCLSQPPLQRSVRTLRRPAPATAPLVSKLSPPTKSLPSSDAMRPLSRAGPXRKQEDSAPQDPEPPRNRGPGN

SEQ ID NO: 12172 - protein, 380 aa, Homo sapiens
MAKGQGESWLLDQEALAEIEKQQQKYKSLEARAVSPVLDAGWTLPSGSLQSAEESAERELNIDHGAARPSLLHDQADHQAFGAPIFLDQQSESPKPSYAEVLRISEKKAAARQGLADKIPTFLGQSTWGKVALKRAADLPVQRSNSDTGQTASSSGSLTPVYPDWETPPSRGRPCIYHLTQESSGWHLAGAPFGQSFQRKEQAAIFAVMQPLLVIPRQTGSGVDLQQTPVDLKQRERNNININKKDVLSETSSEDHRLQRSKVDKSTKMGRNQCKKAENSKNQNAYSPTKDHNFLPAREQNWTESEFDELTEVGFRRWVITNSSELKEHVLTQCKEAKNLEKRLDELLIRITSSEKNINDLMEVKNTAQELREAYTGINS

SEQ ID NO: 12173 - protein, 15 aa, Homo sapiens
SASLRLPKCWDHRRG

SEQ ID NO: 12174 - protein, 86 aa, Homo sapiens
  misc_feature (1)...(86): Xaa = X or * as defined in Table 2
TFDFPNWRSYFSMSNWITSLPTLLSSWDYRHVPLYPAKICIFSRDRVLPYWPGXSHDFTLFVSMTILTLQIYKMTKLDNYLETIYY

SEQ ID NO: 12175 - protein, 108 aa, Homo sapiens
  misc_feature (1)...(108): Xaa = X or * as defined in Table 2
WELLIYFSGHTCSNLSPLLSLSFFFFFXDSLAVSAPGVQWHDLCSLRPLPPRFKRFWCLSLLSGWDYRHVPQYPAKICIFSRDRVLPILAKASRNVSFLTLNMLGGFS

SEQ ID NO: 12176 - protein, 106 aa, Homo sapiens
  misc_feature (1)...(106): Xaa = X or * as defined in Table 2
AFFFFFFFXDGACSVTRLECSGTITAHCNFRHLGSSNFPASTSRVVEITGTCHHTXLIFVFLVETGFHHVGQAGLELLTXVIHPPQSTKVLGLQVVSHCTRPLSDF

SEQ ID NO: 12177 - protein, 112 aa, Homo sapiens
  misc_feature (1)...(112): Xaa = X or * as defined in Table 2
TITIGQNFFFFFLEMGSCSVARLECSGISAHCNLKLLGSSNLPTSTSXVAGTTGVCATIPSYFYNKISMXNQSLPMLPSLGLELLGLRPVFLPRPPKVLGITRHEPPHSALK

SEQ ID NO: 12178 - protein, 115 aa, Homo sapiens
  misc_feature (1)...(115): Xaa = X or * as defined in Table 2
LRWSLDSVAQGGVQWHDFGSLQPPPPGFKRLSGLSLMSSWDYRRPPPRLANFLHFXXRRSFTMLARMVLISXPHDPPASASQSAGITGVSDHAQSQIFLKLQMTKSMGFKTKFLN

SEQ ID NO: 12179 - protein, 133 aa, Homo sapiens
  misc_feature (1)...(133): Xaa = X or * as defined in Table 2
FFFWRQSLTLVTQAGVQXLDHGSLQPPLPGPKGFSHLSPPSSWDHKHAPPHLANFFLXRHGFTMRLVLTSLPQCDPPAAASQSAGITGVSHCAQPVIFCKKLDFSSTDIFTPSNLQPRGFWDLTAPQGEIVST

SEQ ID NO: 12180 - protein, 36 aa, Homo sapiens
  misc_feature (1)...(36): Xaa = X or * as defined in Table 2
PPTGSLLTPPLWDPQFASLFNGTLXWEREXPLPQNV

SEQ ID NO: 12181 - protein, 256 aa, Homo sapiens
  DOMAIN (53)..(101): Ubiquitin-conjugating enzymes proteins domain identified by eMATRIX, accession number BL00183, p-value=6.400e-25, raw score of 28.97
  DOMAIN (8)..(175): Ubiquitin-conjugating enzyme domain identified by PFam, accession name UQ_con, E-value=2.6e-36, PFam score of 134.0
  misc_feature (1)...(256): Xaa = X or * as defined in Table 2
RCNSAQQQMTSSQKALMLELKSLQEEPVEGFRITLVDESDLYNWEVAIFGPPNTLYEGGYFKAHIKFPIDYPYSPPTFRFLTKMWHPNIYEEWEMYGISILHPPVDDPQSGELPSERWNPTQQCEGLILLRCXSHWLNEPQHLSPQPMSDASVMFRKWERQXREKTKEYGLKFIRETKFSATXGPKAGKGWGVEGSPTNPGREYCIKTEVPRNDEQVQSLLYDELGMMTDIDDERXGRRKDADCYDDDEFWGMRKP

SEQ ID NO: 12182 - protein, 190 aa, Homo sapiens
  DOMAIN (1)..(190): Enol-ase domain identified by PFam, accession name enolase, E -value=4.9e-23, PFam score of 83.6
  misc_feature (1)...(190): Xaa = X or * as defined in Table 2
ALGKAGYIDKYVTAMGIVAFVFFRSGKYNLDFRSRNDPARHITPEQLVALYKSFIREKHXVFPDXGLVQRTLFSLVFLVCLKNSFDCDDREVWKKFTANACLQEAGNDLTVNLRHIAEAVDENSCNFLQLTVDXIACKLIQSNWXGIMVSHYSLTXNTFIAILVKHCTGXINTGAPCXSEPLARYKELSF

SEQ ID NO: 12183 - protein, 880 aa, Homo sapiens
  DOMAIN (493)..(540): kw TRANSCRIPTASE REVERSE II ORF2 domain identified by eMATRIX, accession number DM01354V, p-value=1.000e-40, raw score of 12.97
TLQSKSHYMGQARQASGASVWRAGCGHGQQQVLEPKWDERGSSIEEEHEQEHKQARSGMVNRYHDGPSSTPFSGIYSQGPVNVISGADRHLIQKSSSWHLLGALLGQSFQRKEQAAIFAVLQPLLVIPRQTGSGVDLQQTPADLQKRGLTVRGKTNKQKGIVATSAKRTSTQRPHPKDHNSLPAREQNWIENEFDERTEVGFRRWVITNSSKLKEHVLTQCKEANNAWLLVEFVQWDLLARDGGWKEKLGYLFLLFYPLWCHSSGSDCVPVQVYLINHTGIPFSAHCQEDRHRAFLLKDSDPSALIRSRQLQVFVKTLDIRQGSQLRNVCGQCPSQEHSSESWGSVMALTCPSQRACRGARVTGSKVPGPGWEELPLEVAMAPQNIHASGRGCGMTRTGETRPCFSPAILVLRPLHTQSTACSRRLFSQKNFWEHTEVRISLDPGGTSSYEEKLISNFSKVSGYKINVQKSQAFLYTNNGQTESQIMSELPFTIASKRIKYLGIQLTRDVKDLFKENYKPLLKEIKEDTNKWKNIPCSWVGGINIVKMAILPKVIYRFNAIPIKLPMPFFTELEKTTLKFIWNQKRARIAKSILSQKTKAGGITLPNFKLYYKATVTKTAWYWYQNRDIDQWNRTEPSEITPHSYNYLIFDKPEEKKQWGKDSLFNKWCWENWRAICRKLKLDPFLTPYTKINLRWIKDLNVRPKTIKTLEENLGITIQDIGMGKDFMSKTPKAMATKDKIDKWDLIKLKSLIKLKSTAKETTIRVNRQPKKWEKIFPTYSSDKGLISRIYNELKQIYKKKTNNPIKKWAKDMNRRFSKEDIYAAKKHMKKCSPSLAIREMQIKTTVRYHLTPVRMVIIKKSGNNRCWGGCGEIGTLLHC

SEQ ID NO: 12184 - protein, 166 aa, Homo sapiens
  misc_feature (1)...(166): Xaa = X or * as defined in Table 2
GRERPLLSPYMETLYRVPFLVLECPNLKLKKPPWLHMPSAMTVYALVVVSYFLITGGIIYDVIVEPPSVGSMTDEHGHQRPVAFLGLQSKMDNNINGKGLCIQASXFTMGGFRFSXILDPIECTKYPKTSIDSFFCSIGISSVVLLEFFPWARSNSMRNGNCPGLI

SEQ ID NO: 12185 - protein, 108 aa, Homo sapiens
  misc_feature (1)...(108): Xaa = X or * as defined in Table 2
FLKRQRFGLVAQAGLXWHNLGSLQPLPPGFKXFSCLSLLSSWDYRHLPPHPPNFLLFLVETGFYHFGQAGLKLLTDSGDPPALASQSAGIIGVSHRAGPGLCTFSNHI

SEQ ID NO: 12186 - protein, 227 aa, Homo sapiens
  DOMAIN (108)..(136): HECT-domain (ubiquitin-transferase) domain identified by eMATRIX, accession number PF00632B, p-value=3.471e-13, raw score of 18.45
  DOMAIN (1)..(200): HECT-domain (ubiquitin-transferase) domain identified by PFam, accession name HECT, E-value=0.017, PFam score of -118.1
  misc_feature (1)...(227): Xaa = X or * as defined in Table 2
GRVGFNVRWDRNDTNLIPNGSSITVNQTNKRDYVSKYINYIFNDSVKAVYEEFRRGFYKMCDEDIIKLFHPEELKDVMLGNTDYDWENIEKNARYEPGYNSSHPTIVMFWKAFHKLTLEEKKKFLVFLTGTDRLQMKDLNNMKITFCCPESWNERDPIRALTCYPVSLLPSPKYSYNGNSXKKRFKKPINNNRGIWLTSLPCPNSLILLLLSLLLLLLLLFLYFVLF

SEQ ID NO: 12187 - protein, 174 aa, Homo sapiens
  misc_feature (1)...(174): Xaa = X or * as defined in Table 2
ISHDAIAQESKRYWQNLEANVPGAQVLGNQIMPGFLNMKIKFVCRPQCPEKRSKSIEPDKNRKYCSAKARHSWTKDRRAMRVMSYXRKKWMNIRPLPTKKQMPLQFDLCNHIASGKKCQYVGNCSFAHSPEEREVWTYMKENGIQDMEQFYELWLKSQKNEKSEDIASQSNKEN

SEQ ID NO: 12188 - protein, 260 aa, Homo sapiens
  misc_feature (1)...(260): Xaa = X or * as defined in Table 2
SYSYFFIQLCNHIASGKKCQYVGNCSFAHSPEEREVWTYMKENGIQDMEQFYELWAQESKKXKKXRHRPVSPNKGKWENQIHMANRIMAGRLQWDFSLAGMCGGKTGNSEKQWQGHISSEKHKEKVFHTETDQYCWQHRFPTGYFSICDRYMNGHAAQEGNSCKCLHMGNARTFMEWGRKGRRLPLKVEASTKHRKDHLIGPKDNDFGKYSFLFKDLNXYAGFYGMIPNQSIDQKNLKCSEAHSRGAARFPACIGVYRSS

SEQ ID NO: 12189 - protein, 47 aa, Homo sapiens
  misc_feature (1)...(47): Xaa = X or * as defined in Table 2
LHQPPTTQTLAFTSNLRGRXRSAALPDALDSSKVSEMHRFLKRRGVN

SEQ ID NO: 12190 - protein, 292 aa, Homo sapiens
  DOMAIN (144)..(185): Carboxylesterases type-B serine proteins domain identified by eMATRIX, accession number BL00122E, p-value=7.600e-35, raw score of 22.02
  DOMAIN (91)..(272): Carboxylesterases domain identified by PFam, accession name COesterase, E-value=4.1e-61, PFam score of 212.3
MVIMERSKLSELAASTSVQEQNTTDEEKTQPVSLLPITIKLLHDLSPLPLLRNILAPEFLLPGTHVAQPESLTESKELEDSRGFSSLTAHPVLVWFPRGAFKTGSASIFDGSALAAYDDVLVVVVQYRLGIFGFFTTGDEHSPGNWGHLDQLAALHWVQDNIASFGGNPGSVTIFGGSVGGESVSVLVMVWIHRGGLMVGTASTSDGRVLAAHENVVVVTIQHCLGIWGFFRNPNGEGLPHWPEYNQKEGYLQIGANTQAAQKLKDKEVAFWTNLFAKKAVEKPPQTEHIEL

SEQ ID NO: 12191 - protein, 26 aa, Homo sapiens
LVRSGRKGRRRVFSLSEADSHGGHWV

SEQ ID NO: 12192 - protein, 87 aa, Homo sapiens
IILGEVTEQAPKSMKERLVLCLAGFAVAQCINQHSSPSLSSQSPPSASGSPSGSGSTSHCDSGGTSSSSTPRHSLSFPDTSFLAFLN

SEQ ID NO: 12193 - protein, 124 aa, Homo sapiens
MQVTGVRTDSGALNITIHKLASSPHSKPFPIFQATFIFSDHIRCIIAEQRLAKGRIPGKAHEDAENSCPPWTSQSSPPLKSWGLDSAPPPPLSTCLSASTTRGAGAAATPQCSAPCLHRWTRCQ

SEQ ID NO: 12194 - protein, 238 aa, Homo sapiens
  DOMAIN (37)..(83): kw TRANSCRIPTASE REVERSE II ORF2 domain identified by eMATRIX, accession number DM01354O, p-value=1.381e-14, raw score of 8.73
MDKFLDNYTLRRLNQEEVKSLNRPITSSEIEAVINSLPTKKSPEPERFTAEFFQKYKEELSTIRLVPHFMFRTSPYAPPILSQRLPAKFSTWALDSNRPAVSLERGLPVTISLTEAQLMNPIKGKLLLLNQSMESLPSPVGYAIQDHNSSPARKQNCMENEFDELTEVGFRRWVITNSSELKEHVLTQCKEAENFEKRLHELLTRITSLEKNINDLMELKNTARELREAYTSINSQTD

SEQ ID NO: 12195 - protein, 329 aa, Homo sapiens
MVHGREEGGMDPEKLERIQLPVPNAAEKTTYNHPLAERLIRIMNNAAQPDGKIRLATLELSCLLLKQQVLMSAGCIMKDVHLACLEGAREESVHLVRHFYKVIGRAQMDSSMGEDIFLDMFEDEYRSMTMKPMNVEYLMMDASILLPPTGTPLTGIDFVKRLPCGDVEKTRRLLPRVDECGCEVTSPGPGRQQLAHAARKQEGENRAFVPGQLVGSAHHRCHPVVPARSVSSSIKSSSYNKVPTVPATPDYYEGHLILGDKVLADDGCSVQAIRVFFMLRSLSLQLRGEPETQLPLTREEDLIKTDDVLDLRGLSPGSGKMAFSSPKIC

SEQ ID NO: 12196 - protein, 692 aa, Homo sapiens
  DOMAIN (460)..(503): Histone H2B proteins domain identified by eMATRIX, accession number BL00357, p-value=2.598e-10, raw score of 7.74
DERRVGAADMFGRSRSWVGGGHGKTSRNIHSLDHLKYLYHVLTKNTTVTEQNRNLLVETIRSITEILIWGDQNDSSVFDFFLEKNMFVFFLNILRQKSGRYVCVQLLQTLNILFENISHETSLYYLLSNNYVNSIIVHKFDFSDEEIMAYYISFLKTLSLKLNNHTVHFFYNEHTNDFALYTEAIKFFNHPESMVRIAVRTITLNVYKVDNQAMLHYIRDKTAVPYFSNLVWFIGSHVIELDDCVQTDEEHRNRGKLSDLVAEHLDHLHYLNDILIINCEFLNDVLTDHLLNRLFLPLYVYSLENQDKVFLIIHHAPLVNSLAEVILNGDLSEMYAKTEQDIQRSSVLPTLSSLWQGSHLSLNQLQSGLHKCSSHLCGAQAAADSVTGEIPAIRSLEWLISAGSKARTFFFLKMLIGFWEKVDCEYQRRQVLSTRLQEALPSNRLTDVAAVHSSCMLGFGSTAPRGSWIGDPAAVHLPLPGELAEHLGSKGTTTVTKHQPQAKPSIRCFIKPTETLERSLEMNKHKGKRRVQKRPNYKNVGEEEDEEKGPTEDAQEDAEKAKGTEGGSKGIKTSGESEEIEMVIMERSKLSELAASTSVQEQNTTDEEKSAAATCSESTQWSRPFLDMVYHALDSPDDDYHALFVLCLLYAMSHNKGKSPEKEEGLSGTQSHPGKAGTFGKEGAEERKRAQV

SEQ ID NO: 12197 - protein, 922 aa, Homo sapiens
  misc_feature (1)...(922): Xaa = X or * as defined in Table 2
RNLLVETIRSITEILIWGDQNDSSVFDFFLEKNMFVFFLNILRQKSGRYVCVQLLQTLNILFENISHETSLYYLLSNNYVNSIIVHKFDFSDEEIMAYYISFLKTLSLKLNNHTVHFFYNEHTNDFALYTEAIKFFNHPESMVRIAVRTITLNVYKVSLDNQAMLHYIRDKTAVPYFSNLVWFIGSHVIELDDCVQTDEEHRNRGKLSDLVAEHLDHLHYLNDILIINCEFLNDVLTDHLLNRLFLPLYVYSLENQDKGGERPKISLPVSLYLLSQVFLIIHHAPLVNSLAEVILNGDLSEMYAKTEQDIQRSSAKPSIRCFIKPTETLERSLEMNKHKGKRRVQKRPNYKNVGEEEDEEKGPTEDAQEDAEKAKGTEGGSKGIKTSGESEEIEMVIMERSKLSELAASTSVQEQNTTDEEKSAAATCSESTQWSRPFLDMVYHALDSPDDDYHALFVLCLLYAMSHNKGMDPEKLERIQLPVPNCGREGPPYNHPLGERFIQGSWNNVAQPDGKIRLATLGAXGCLVSXRQQVLMSAGCIMKDVHLACLEGAREESVHLVRHFYKGEDIFLDMFEDEYRSMTMKPMNVEYLMMDASILLPPTGTPLTGIDFVKRLPCGDVEKTRRAIRVFFMLRSLSLQLRGEPETQLPLTREEDLIKTDDVLDLNNSDLIACTVITKDGGMVQRFLAVDIYQMSLVEPDVSRLGWGVVKFAGLLQDMQVTGVEDDSRALNITIHKPASSPHSKPFPILQATFIFSDHIRCIHIAKQRFAKGRIQARRMKMQRIAALLDLPIQPTTEVLGFGLGSSTSTQHLPFRFYDQGRRGSSDPTVQRSVFASVDKVPGFAVAQCINEHSSPSLSSQSPPSASGSPSGSGSTSHCDSGGTSSSSTPSTAQSPAVRSGRKGRRRVFSLSEADSHGGHWV

SEQ ID NO: 12198 - protein, 600 aa, Homo sapiens
  DOMAIN (94)..(108): ACONITASE FAMILY SIGNATURE domain identified by eMATRIX, accession number PR00415F, p-value=1.000e-14, raw score of 11.66
  DOMAIN (2)..(324): Aconitase family (aconitate hydratase) domain identified by PFam, accession name aconitase, E-value=2.4e-189, PFam score of 621.5
NYAYPGVLLIGTDSHTPNGGGLGGISIGVGGRDRVDVMAGIPCELKCTKVIAMKLTGSLSGWTSPKDVILKVAGILTVKGGTGAIVEYHGPGVDSISCTGMATICNMGAEIGATTSVFPYNHRMKKYLSKTGRADIASLREEFKDHLVPDPGCQYDQVIEINLNELKPHINGPFTPDLAHPVAEVGTVAEKEGWPLDIRVGLIGSCTNSSYEDMGRSAAVAKQALAHGLKCKSQFTITPGSEQIRATIERDGYAQILRDVGGIVLANACGPCIGQRDRKDIKKGEKNTMVTSYNRNFTGRNDAFPETHAFVTSPEIVTALAIAGTLKFNPETDFLTGKDGKKFKLEAPDADELPRSSFDPGQDTYQQPPKDSSGQRVDVSPTSQRLQLLEPFDKWDGKDLEDLQILIKVKGKCTTDHISAAFPWLKFRGHLDNISNNLLIGAINIENGKANSVRNAVTQEFGPVPDTARYYKKHGIRWVVIGDENYGEGSSREHAALEPRHLGGRAIITKSFARIHETIKKQGLLPLTFADPSDYNKIHPVDKLTIQGLKDFAPGKPLKCIIKHPNGTQETILLNHTFNETQIEWFRAGSALNRMKELQQ

SEQ ID NO: 12199 - protein, 85 aa, Homo sapiens
  misc_feature (1)...(85): Xaa = X or * as defined in Table 2
GQAGRARQVRSVPSSALITLPPLAXQKHGISRWVVIGDENYGEGSSREHAALEPRHLGGRAIITKSFARIHGELESVPRPSSSHP

SEQ ID NO: 12200 - protein, 790 aa, Homo sapiens
  DOMAIN (199)..(254): Aconitase family proteins domain identified by eMATRIX, accession number BL00450B, p-value=2.875e-34, raw score of 42.34
  DOMAIN (70)..(509): Aconitase family (aconitate hydratase) domain identified by PFam, accession name aconitase, E-value=2.1e-278, PFam score of 912.8
  misc_feature (1)...(790): Xaa = X or * as defined in Table 2
SLSVHKMAPYSLLVTRLQKALGVRQYHVASVLCQRAKVAMTHFEPNEYIHYDLLEKNINIVRKRLNRPLTLSEKIVYGHLDDPASQEIERGKSYLRLRPDRVAMQDATAQMAMLQFISSGLSKVAVPSTIHCDHLIEAQVGDEKDLRRAKDINQEVYNFLATAGDKYGVGFWSPGSGIIHQIILENYAYPGVLLIGTDSHTPNGGGLGGICIGVGGADAVDVMAGIPWELKCPKVIGVKLTGSLSGWTSPKDVILKVAGILTVKGGTGAIVEYHGPGVDSMSCTGMATICNMGAEIGATTSVFPYNHRMKKYLSKTGREDIANLADEFKDHLVPDPGCHYDQLIEINLSELKPHINGPFTPDLAHPVAEVGKVAEKEGWPLDIRVGLIGSCTNSSYEDMGRSAAVAKQALAHGLKCKSQFTITPGSEQIRATIERDGYRQILRDLGGIVLANACGPCIGQWDRKDIKKGEKNTIVTSYNRNFTGRNDANPETHAFVTSPEIVTALAIAGTLKFNPETNYLTGTDGKKFRLEAPDADELPKGEFDPGQDTYQHPPKDSSGQHVDVSPTSQRLQLLEPFDKWDGKDLEDLQILIKVKGKCTTDHISAAGPWLKFRGHLDNISNNLLIGAINIENGKANSVGNAVTQEFGPVPDTARYYKKHGIRWVVIGDENYGEGSSREHAALEPRHLGGRAIITKSFARDPRDEPGRKQGLLPFGPFADPADYNKIHPVDKLTIQGLKDFTPGRSPLKCIIKHPNGTQETILLNHTFNETQIEWFRAGSALQQKXRNLQQ

SEQ ID NO: 12201 - protein, 66 aa, Homo sapiens
APRGSWMVVAEDPACSVTLCPESLSGYLPGGSGQGPSPAAGEACGTQLGWQPLVGRCGPHVSVLSK

SEQ ID NO: 12202 - protein, 114 aa, Homo sapiens
  misc_feature (1)...(114): Xaa = X or * as defined in Table 2
EASAWPAPRGSWMVVAEDPACSVTLCPESLSGYLPGGSGQGPSPAAGTSPSLPPRSLPGLEKLRSPSGRESRLSSSAPRAPSISAKAQLQCQAEEEDPEIVNNVXFSSVTCLSL

SEQ ID NO: 12203 - protein, 91 aa, Homo sapiens
  misc_feature (1)...(91): Xaa = X or * as defined in Table 2
MALPGRLPHRKLAGGTLEAPWPGIPSGAVRRHQPQPPTTLXXWLGKVKKPLRKRIEAKFLCAEGPEHIRQGSAAVPGGGGRSRNCEQCLIX

SEQ ID NO: 12204 - protein, 250 aa, Homo sapiens
  DOMAIN (69)..(103): Regulator of chromosome condensation (RCC1) proteins domain identified by eMATRIX, accession number BL00625B, p-value=7.045e- 14, raw score of 17.69
  misc_feature (1)...(250): Xaa = X or * as defined in Table 2
FVVDFDRPHETRVLQVSCGRAHSLVLTDREGVFSMGNNSYGQCGRKVVENEIYSESHTVHRMHDFDGQVDQVACGQDHSLFLTDKGKVYSCGWGADGQTGLGHYNITSSPTKLGGDLAGVNVIQVATYGDCCLAVSADGDIFGWGNLEYLQLAAPVTDSTQVNVPRCLHFSGVGKVRQCLHAVARAVQCXTGEGHVFVWGYGILGKGPNLSGKCPSLKMIPPTLFGFDGFQPRNPGFPAFRCGIQATLLH

SEQ ID NO: 12205 - protein, 181 aa, Homo sapiens
MKQPNRKRKLNMDSKERLDQDGRLVKMSFFVFCCVVSSEESEHEETQDLMCSELFWVLLHMWSLDQQHQHHLEDHNSSPARGQHWMENESDELTEVGFRRWVITNSSELKEHALTQCKEAKNLEKRLDKLLTRIISLEKNINELMELKSTARELREAYTSINSQIDQVEKGYQRLKINLMK

SEQ ID NO: 12206 - protein, 89 aa, Homo sapiens
  misc_feature (1)...(89): Xaa = X or * as defined in Table 2
GQVCIAETGVQWYHLSSLQPLPPGFKRFLCSASRRAPPCPANFXFLVEMGFHHVGQAGLQLLTLGDPPTSASQSAGITGVSHHALPAWL

SEQ ID NO: 12207 - protein, 140 aa, Homo sapiens
  misc_feature (1)...(140): Xaa = X or * as defined in Table 2
FTAALNSWVIKLSSCFSLLSSWDCMYMPPCPASFFFFFLRXSFALVAQAGVQWCDLGSLPPPPSGFERFSCLGLPSSWDYRRPPPTPGXFFFFVFLVEMGFHYVGQAGLELLTSSDLPTSASQSAGITGVSHHALPSLYK

SEQ ID NO: 12208 - protein, 1812 aa, Homo sapiens
  DOMAIN (931)..(945): C2 DOMAIN SIGNATURE domain identified by eMATRIX, accession number PR00360B, p-value=7.158e-10, raw score of 13.61
  DOMAIN (111)..(1389): C2 domain identified by PFam, accession name C2, E-value=4.1e -33, PFam score of 123.4
NMTPSELMDEIISIRVYNSHSLRADCLMGEFKIDVGFVYDEPGHAVMRKWLLLNDPEDTSSGSKGYMKVSMFVLGTGDEPPPERRDRDNDSDDVESNLLLPAGIALRWVTFLLKIYRAEDIPQMDDAFSQTVKEIFGGNADKKNLVDPFVEVSFAGKKVCTNIIEKNANPEWNQVVNLQIKFPSVCEKIKLTIYDWDRLTKNDVVGTTYLHLSKIAASGGEVEDFSSSGTGAASYTVNTGETEVGFVPTFGPCYLNLYGSPREYTGFPDPYDELNTGKGEGVAYRGRILVELATFLEKTPPDKKLEPISNDDLLVVEKYQRRRKYSLSAVFHSATMLQDVGEAIQFEVSIGNYGNKFDTTCKPLASTTQYSRAVFDGNYYYYLPWAHTKPVVTLTSYWEDISHRLDAVNTLLAMAERLQTNIEALKSGIQGKIPANQLAELWLKLIDEVIEDTRYTLPLTEGKANVTVLDTQIRKLRSRSLSQIHEAAVRMRSEATDVKSTLAEIEDWLDKLMQLTEEPQNSMPDIIIWMIRGEKRLAYARIPAHQVLYSTSGENASGKYCGKTQTIFLKYPQEKNNGPKVPVELRVNIWLGLSAVEKKFNSFAEGTFTVFAEMYENQALMFGKWGTSGLVGRHKFSDVTGKIKLKREFFLPPKGWEWEGEWIVDPERSLLTEADAGHTEFTDEVYQNESRYPGGDWKPAEDTYTDANGDKAASPSELTCPPGWEWEDDAWSYDINRAVDEKGWEYGITIPPDHKPKSWVAAEKMYHTHRRRRLVRKRKKDLTQTASSTARAMEELQDQEGWEYASLIGWKFHWKQRSSDTFRRRRWRRKMAPSETHGAAAIFKLEGALGADTTEDGDEKSLEKQKHSATTVFGANTPIVSCNFDRVYIYHLRCYVYQARNLLALDKDSFSDPYAHICFLHRSKTTEIIHSTLNPTWDQTIIFDEVEIYGEPQTVLQNPPKVIMELFDNDQVGKDEFLGRSIFSPVVKLNSEMDITPKLLWHPVMNGDKACGDVLVTAELILRGKDGSNLPILPPQRAPNLYMVPQGIRPVVQLTAIEILAWGLRNMKNFQMASITSPSLVVECGGERVESVVIKNLKKTPNFPSSVLFMKVFLPKEELYMPPLVIKVIDHRQFGRKPVVGQCTIERLDRFRCDPYAGKEDIVPQLKASLLSAPPCRDIVIEMEDTKPLLASKLTEKEEEIVDWWSKFYASSGEHEKCGQYIQKGYSKLKIYNCELENVAEFEGLTDFSDTFKLYRGKSDENEDPSVVGEFKGSFRIYPLPDDPSVPAPPRQFRELPDSVPQECTVRIYIVRGLELQPQDNNGLCDPYIKITLGKKVIEDRDHYIPNTLNPVFGRMYELSCYLPQEKDLKISVYDYDTFTRDEKVGETIIDLENRFLSRFGSHCGIPEEYCVSGVNTWRDQLRPTQLLQNVARFKGFPQPILSEDGSRIRYGGRDYSLDEFEANKILHQHLGAPEERLALHILRTQGLVPEHVETRTLHSTFQPNISQGKLQMWVDVFPKSLGPPGPPFNITPRKAKKYYLRVIIWNTKDVILDEKSITGEEMSDIYVKGWIPGNEENKQKTDVHYRSLDGEGNFNWRFVFPFDYLPAEQLCIVAKKEHFWSIDQTEFRIPPRLIIQIWDNDKFSLDDYLGFLELDLRHTIIPAKSPEKCRLDMIPDLKAMNPLKAKTASLFEQKSMKGWWPCYAEKDGARVMAGKVEMTLEILNEKEADERPAGKGRDEPNMNPKLDLPNRPETSFLWFTNPCKTMKFIVWRRFKWVIIGLLFLLILLLFVAVLLYSLPNYLSMKIVKPNV

SEQ ID NO: 12209 - protein, 1430 aa, Homo sapiens
  DOMAIN (560)..(574): C2 DOMAIN SIGNATURE domain identified by eMATRIX, accession number PR00360B, p-value=7.158e-10, raw score of 13.61
  DOMAIN (521)..(1037): C2 domain identified by PFam, accession name C2, E-value=1.7e -18, PFam score of 74.9
WAVFDGNYYYYLPWAHTKPVVTLTSYWEDISHRLDAVNALLAMAERLQTNIEALKSGIQGKIPANQLAELWLKLIDEVIEDTRYTLPLTEGKANVTVLDTQIRKLRSRSLSQIHEAAVRMRSEATDVKSTLAEIEDWLDKLMQLTEEPQNSMPDIIIWMIRGEKRLAYARIPAHQVLYSTSGENASGKYCGKTQTIFLKYPQEKNNGPKVPVELRVNIWLGLSAVEKKFNSFAEGTFTVFAEMYENQALMFGKWGTSGLVGRHKFSDVTGKIKLKREFFLPPKGWEWEGEWIVDPERSLLTEADAGHTEFTDEVYQNESRYPGGDWKPAEDTYTDANGDKAASPSELTCPPGWEWEDDAWSYDINRAVDEKGWEYGITIPPDHKPKSWVAAEKMYHTHRRRRLVRKRKKDLTQTASSTARAMEELQDQEGWEYASLIGWKFHWKQRSSDTFRRRRWRRKMAPSETHGAAAIFKLEGALGADTTEDGDEKSLEKQKHSATTVFGANTPIVSCNFDRDYIYHLRCYVYQARNLLALDKDSFSDPFAHICFLHRSKTTEIIHSTLNPTWDQTIIFDEVEIYGEPQTVLQNPPKVIMELFDNDQVGKDEFLGRSIFSPVVKLNSEMDITPKLLWHPVMNGDKACGDVLVTAELILRGKDGSNLPILPPQRAPNLYMVPQGIRPVVQLTAIEILAWGLRNMKNFQMASITSPSLVVECGGERVESVVIKNLKKTPNFPSSVLFMKVFLPKEELYMPPLVIKVIDHRQFGRKPVVGQCTIERLDRFRCDPYAGKEDIVPQLKASLLSAPPCRDIVIEMEDTKPLLASKCLSSMSTALSKMASPATVHLTEKEEEIVDWWSKFYASSGEHEKCGQYIQKGYSKLKIYNCELENVAEFEGLTDFSDTFKLYRGKSDENEDPSVVGEFKGSFRIYPLPDDPSVPAPPRQFRGLPDSVPQECTVRIYIVRGLELQPQDNNGLRDPYIKITLGKKVIEDRDHYIPNTLNPVFGRMYELSCYLPQEKDLKISVYDYDTFTRDEKVGETIIDLENRFLSRFGSHCGIPEEYCVSGVNTWRDQLRPTQLLQNVARFKGFPQPILSEDGSRIRYGGRDYSLDEFEANKILHQHLGAPEERLALHILRTQGLVPEHVETRTLHSTFQPNISQYYLRVIIWNTKDVILDEKSITGEEMSDIYVKGWIPGNEENKQKTDVRYRSLDGEGNFNWRFVFPFDYLPAEQLCIVAKKEHFWSIDQTEFRIPPRLIIQIWDNDKFSLDDYLGFLELDLRHTIIPAKSPEKCRLDMIPDLKAMNPLKAKTASLFEQKSMKGWWPCYAEKDGARVMAGKVEMTLEILNEKEADERPAGKGRDEPNMNPKLDLPNRPETSFLWFTNPCKTMKFIVWRRFKWVIIGLLFLLILLLFVAVLLYSLPNYLSMKIVKPNV

SEQ ID NO: 12210 - protein, 117 aa, Homo sapiens
  misc_feature (1)...(117): Xaa = X or * as defined in Table 2
FHSLSPGASKPMLEPGLDWEPCKKLNDVKRAKSVPLTRHLHXVYLLMLSLPPPPTPQQAPVYDVPLPVSKCSHCQFPLWFXFAFLXWPVMMSVFSCVCWLHKCLLLRSVCSYPLPTF

SEQ ID NO: 12211 - protein, 40 aa, Homo sapiens
  misc_feature (1)...(40): Xaa = X or * as defined in Table 2
SPCPCLCPEWYCLGFLLGFLWFLVXHLSLXSILNYFLYKV

SEQ ID NO: 12212 - protein, 112 aa, Homo sapiens
MAVLPLPSNPHDQPQNSMPDIIIWMIRGEKRLAYARIPAHQVLYSTSGFLELDLRHTIIPAKSPEKCRLDMIPDLKAMNPLKAKTASLFEQKSMKGWWPCYAEKDGARVMAV

SEQ ID NO: 12213 - protein, 527 aa, Homo sapiens
  DOMAIN (139)..(186): kw TRANSCRIPTASE REVERSE II ORF2 domain identified by eMATRIX, accession number DM01354V, p-value=4.638e-37, raw score of 12.97
MDEAGNHHSQQTNTGTENQTPHVLPHKWELNNENAWTQGGEHHTLGPVGSVGSSGQGNQARERNKDIQLGKEEVKLALFADNMIVYLENPIISAQNLLKLISNFSKVSGYKINVQKSQAFLYINKRQTEIQIMSELPFTTASKRIKYLGTQITRDVKDLFKEDYKQLLNKIKEDTNKLKNIPCSWIGRINIMKMAILPKGPSCKGSKLHPYLPLPSQVALDLLGHMAQVAEQLAQEPGLVAEPSPVLSPTQNSGNFPGHLDEQEMEARQSRCNHLLACCVVNINPDYTNEHSYPRLDKEGSRSPFLKNCMQVLPVEAAEQQSLLPVPSSGTFIPEGTHQVPAGAVLYEVSVNPCWEESPSQEAQGSRTHLRRDAMPREEESREAVWLQWLCGTAVSSARFKLPGSFVYTVRGKPPTQASVMVDALPPAKLKCPRSTSDCCAGSENFKPVDLSLLASMGSIFTLGTGKKCFKVTTGEKQNCQWEKIITISSPEECDVPIPVSPECESPECDVPLPVSMCSHCSIPTYE

SEQ ID NO: 12214 - protein, 244 aa, Homo sapiens
MVIAEQVVFGYISKSEISSWFGAIAGRHLPVGADRHLIQESTGWHLAGAPLGWSFQRKEQTAIFAVLQPLLVIPRQTGYGVDLQQMPADLQQRFLTVRRKTNKQKGIVSTSTKRTSSEGHQHQRRKVDKFTEMGRNQHKKAENSKNQNASSPSKDHNSSPAREQNWMENEFDELTEVGFRRSVITNSSKLKEHVLTQCKEARKLEKRLDELLTRKTNLEKNINDLMELKNTAQELGEAYTSINS

SEQ ID NO: 12215 - protein, 116 aa, Homo sapiens
DSVGGFQIYNCELENVAEFEGLTDFSDTFKLYRGKSDENEDPSVVGEFKGSFRIYPLPDDPSVPAPPRQFRELPDSVPQECTVRIYIVRGLELQPQDNNGLCDPYIKITLGKKVLV

SEQ ID NO: 12216 - protein, 505 aa, Homo sapiens
  misc_feature (1)...(505): Xaa = X or * as defined in Table 2
MGKDFMTKTPKAMATKAKIDKWDVIKLKSFCTAKETTIRVNRQPTEWEKFFATYSSDKGLISRIHKELTQIYKKKTNNPIKKWAKDMNRHFSKEDIYAANKHMEKCPSSLAIKEMQIKTTMRYHLMPVRMAIIKKSGKNRWELNNENTWTQEGEHHTLGPVVGWGKGGGKALGDTPNVNDELMAFSTTRPTFFPRSDPTTTRPMAVPPHEEKDDHLETHRPLRPRTTLPHAPDGRWLLLTLTHTSTPGKTGLRTYRPCLSRTEKVQTAGARPSHPHSSAAFTTWAKGPTGRRPGHMRSESATQKEVTMSPCTALRGQKADSKAHGQQGTWAARGMHTESGTCKASRGFPSLLSPRTRIPKVFVAERKGLRGFVLSLTLPFSCIQKHWEQTVPMSPLVEDVSEXTGNLQNGRNFLQPTHLTKGXYPESTKNSHKFTRKKQTTPSKSGQRIXTDTSQKKTFMQPTNTWKNAHHHWPSKKCKSKPQXDTTXCQLEWQSLKSQEKTGGN

SEQ ID NO: 12217 - protein, 32 aa, Homo sapiens
  misc_feature (1)...(32): Xaa = X or * as defined in Table 2
LEASKFSLVPTGPSVXCSPPCVHVFSLFNSHL

SEQ ID NO: 12218 - protein, 107 aa, Homo sapiens
  misc_feature (1)...(107): Xaa = X or * as defined in Table 2
PQFFGNVLGHLLYSFLGPFQCDENIRYLSXCSPSSCPPCTNRPQYVMFPSLCPCVLMVQLPPMSENMWCLVFCSCDSLLRMMVSSFIHVPYRFCYCNLVVYFEVRCH

SEQ ID NO: 12219 - protein, 95 aa, Homo sapiens
  misc_feature (1)...(95): Xaa = X or * as defined in Table 2
LHTRKSVFNCVKLFLHCISSVLINQLYDRPWCVMFPTLCPSVFIVQFPPMSENMWCLVFCPCDTLLRMMVSSFIHVPPERHKSKHHDTRGXCSNM

SEQ ID NO: 12220 - protein, 143 aa, Homo sapiens
  misc_feature (1)...(143): Xaa = X or * as defined in Table 2
QVFGSIVRIHQGEWFPLLYGILLPRVQNCLTNXLDLCWSQHQTPHVLTHRWELNNENTWTQEGEHHTLGPVVGWGEGGGIALGDIPNVNDKLMGAAHQHDFLVSPKITGIVLSISQVRVPFIDHRRKARYSADLTSFLIAIPG

SEQ ID NO: 12221 - protein, 32 aa, Homo sapiens
IPGFPPETCALHFLPHFCKWQPQSSSYSSKEH

SEQ ID NO: 12222 - protein, 780 aa, Homo sapiens
  misc_feature (1)...(780): Xaa = X or * as defined in Table 2
MLEDRDGEEDEGDEDRLDNAVRGPGPKGPVGTVSEAQLARRLTKVKNSRRMLSNKPQDFQVATAWRSASLFNLYIAHLLAIAVMFQWTYSNGQWLNRPALNDFIPTAALGLYNPTPVPILGMTLGGSTQLVAPGIAQSCPGLVLAILIGEGNEATPEDPKDPTCWERLGNHPPSVLQIRVRVIEGRQLSGNNIRPVVKVHVCGQTHRTRIKRGNNPFFDEVLWLQPGDHTPASYSRAGLNDYHNCCKNKMQGVVLTHKWELNNENTWTQDGEHHTLGPVVGLWPQCLTDPEGFGEETWASTQPFAGVTCKALYLLHFTPTAIGSHCLDHCFSDFLGIKNYRKEKVGLRDLGICRRPGEGRLGKHILRNVLGDDAEAELIGTATVALKDLTGDQSRSLPYKLISLLNEKGQDTGIYNCELENVAEFEGLTDFSDTFKLYRGKSDENEDPSVVGEFKGKLQMWVDVFPKSLGPPGPPFNITPRKAKKYYLRVIIWNTKDVILAEKSITGEEMSDIYVKGWIPGNEENKQKTDVHYRSLDGEGNFNWRFVFPFDYLPAEQLCIVAKKEHFWSIDQTEFRIPPRLIIQIWDNDKFSLDDYLGFPRNLTLRHTIHFLQKSPGGNCRGLDMISGTFKAMNPLKAKTAFLFEQKFMNXWWPCYAEKDGARVMAGKVEMTLEILNEKEADERPAGKGRDEPNMNPKLDLPNRPETSFLWFTNPCKTMKFIVWRGFWWVIIGLLFLLILLLFVGRAPLTLLPNYFVQWKIVKPNVLTKGKGFISRVIQQ

SEQ ID NO: 12223 - protein, 98 aa, Homo sapiens
  misc_feature (1)...(98): Xaa = X or * as defined in Table 2
RRSAPSTSLRTTCVSSCCWPRRRAPSMTPGAGYPSGSSAGPPTHSPXPPWTRPSSAQRYLRKXQPQPGPPALLPLLPAPPKAWLSGLGPVVLDSPGPQ

SEQ ID NO: 12224 - protein, 76 aa, Homo sapiens
RWLSPWPLSCPQPGWTARNPQPTRELPPHPQAGKPFLPVPVPFQPTSPSLLPVMGGLSRPGSFSPVSVASLRCCTH

SEQ ID NO: 12225 - protein, 135 aa, Homo sapiens
  misc_feature (1)...(135): Xaa = X or * as defined in Table 2
LQERYSDPGLLASFHGESSQDRLDTVQQEKXNAGSASPPGPPHPNTCQPRDGRGFTRLPCHRMWGTPGIRWKMPLQXAAGPPHAAXWPGSLMPPCLXPSASAWTRQQXXPGSLPTLTSPGXDPGAHILLWRKQSY

SEQ ID NO: 12226 - protein, 533 aa, Homo sapiens
  DOMAIN (410)..(451): kw TRANSCRIPTASE REVERSE II ORF2 domain identified by eMATRIX, accession number DM01354I, p-value=1.419e-37, raw score of 15.55
SITHNSQKVETTKCPRMDEWINKRQYIHTMEYYSALKRKESLLHADSENIMLSERSQTQKDKSAIAKIYKKKVNSAKEVLNKEPKRRSEGSRSNPLLQKLKLNHKQKANGTWNTSKSEPFTPLERGLKPGSQMVWLVGSHPHRAQQTKIHWLEILAASTAAVWDRPGVLELEHLGEGAAVRRSFSRLKRPCLTALKRAVDLPAQRSSSAKGQTASSSGSLIPVYPDWETPPSHKHRRPKVDKSTKMGRNQRKKAENSKNKNASFPPKDLNSSPAREQNWMENEFDELTEVGFKMWVITNSSELKEHVLTQCKEAKNLEKRLDELLTRINSLEKNINDLMELKNTAWELREVYTTRHHTYSKIDNIIGSKTLLSKCKRTEIKTNSLPDHSASKLELRIKKLTKNCTTTQKLNNLLLNDCWVNNDMKAEIKMFFETNENKDTTYHNLWDTFKAVCRGKFIALNAQKRKQERSKTDTLTSKLKELEKQQQTNSKASRRQEITKIRTEPKEIETQKTLQKINESRSWIFEKINKIDH

SEQ ID NO: 12227 - protein, 731 aa, Homo sapiens
  misc_feature (1)...(731): Xaa = X or * as defined in Table 2
RRSAPSTSLRTTCVSSCCWPRRRAPSMTPGAGYPSGSSAAHHRCDGWATTHSPXPPWTRPSWRSAYLRKXQPQPGPTQHCCPLPSQPPAKGVAVRAGPCSAGLSRATIGTGQGPGTSPGHTWGQQRYHEATFWGXLLDCLVFKSEKPRXLILLLITMFXSTSVSLTMLSLDXARGRREPAHPTPGPSPAATNXPGALLPTVQISXKCSSLQAPERASPPPCSPRPPATASFRPSLSDPGPSAPSFGKPSPHLKPNSNIFIFLPYQLLSHLXVAQSMATPCPQPGWTARNPQPTRELPPHPQAGKPLLPVPVPFQPTSPSLLPVMGGLSRPGSSLPSQWLLXGAVHARXPVPFSILPRGTELTWTPSAKGPMGWAAGLAASGGCLHSSRXPTLVFRGWWEHIPVPLPHNRCGDSPGRPXQGSSMVVRDSGELXGLGDPGLPGFENKPCCPFXAEILKWNARLARNAVLTQNAPSPCPYWTWPCLMPSKDPYPEAYPPYVLREAECPLQAVMGPEAPPAWPCSPVGSVTVFPTSVSRSPPPKKLTHCEXPWASSPNLLVPQFPHLEKMGPPLASSSRAAHAPFSPSPHPALGRLMPLPQWALWEPTGSPALTPPEASEACVMSQLSSRXGPRVLCWWGWGMPSFLYLFHRKSPAGAEMQSGLGLPSPXPVLLXGPEAGPGPVAAEPPSQEVKLVPSGRLPVRGLSPSFQSNSRRGLQSPVRQTGPFPKVKPCV

SEQ ID NO: 12228 - protein, 180 aa, Homo sapiens
  DOMAIN (28)..(63): Ribosomal protein L3 proteins domain identified by eMATRIX, accession number BL00474C, p-value=6.651e-22, raw score of 21.74
  DOMAIN (18)..(114): Ribosomal protein L3 domain identified by PFam, accession name Ribosomal_L3, E-value=1.1e-24, PFam score of 88.3
  misc_feature (1)...(180): Xaa = X or * as defined in Table 2
DFPRQSSXNLNITGKCGISPGTPLNAAHFVPGQYVDVTTKTMCKGFQGVMKRWGLKAQPATHGQSKSTGRPGAVATGDIGRVWPGTKMPGKWGNIYRQEYGLKVWRINTKPPIIYVKWSGPGPXKWLRXRSKDFKLPAFKDLGKNLPIPYIFFLEGDEGGTAQKIGMDEKRVSSPGAPSN

SEQ ID NO: 12229 - protein, 67 aa, Homo sapiens
  DOMAIN (14)..(63): kw TRANSCRIPTASE REVERSE II ORF2 domain identified by eMATRIX, accession number DM01354Z, p-value=1.990e-11, raw score of 9.06
  misc_feature (1)...(67): Xaa = X or * as defined in Table 2
LFGYLPKXVDNMSTKKPCTWIFTLALCITARTWKQPRCPLVGKWIQLCCIXKMKYYSDFKKSCQAMK

SEQ ID NO: 12230 - protein, 140 aa, Homo sapiens
  misc_feature (1)...(140): Xaa = X or * as defined in Table 2
FFFFFLRWSFTLVAXAXVQWRDLNSLQPPPPRFKRFSCLSLPSSWDYRRASPCSANFLDFHFLVETRFHHVCQAGLELLMSGDLPASASQSAGIIGVSHCARPLASLFLIHIFNKCISGVRLCSRPWRYSAAQKSLDLAY

SEQ ID NO: 12231 - protein, 124 aa, Homo sapiens
  misc_feature (1)...(124): Xaa = X or * as defined in Table 2
DGSCFVAQTGVQWHNLGSLQPLPPRFKXFSCLSLPSSWDLRQVPPPHPANFXFLVXPGFHDVGQAGLELLTSGDPPTLATRSVGITGVSHCARPGSIYKQRLDKKLRSSVAARTNRCPLWSLPI

SEQ ID NO: 12232 - protein, 97 aa, Homo sapiens
  misc_feature (1)...(97): Xaa = X or * as defined in Table 2
RRLFFSFLRQSLVLVIQAGVQWGDLGSLRPLPAGFKRFSCLSLPSGXDYRHGPPRLANFWIFTREGMFAMLARLVSNSXPQGDPPASASQSSGDYRA

SEQ ID NO: 12233 - protein, 100 aa, Homo sapiens
  misc_feature (1)...(100): Xaa = X or * as defined in Table 2
ETETCSVAQAGVQWPILSSLQPLPPRLKRFSCLSLLNSWDYRCLPPHAANFXFLVETGFPHVGQSGLKLLTSGDLPTSGSQSAGITGVSHCTWAGKSYIF

SEQ ID NO: 12234 - protein, 162 aa, Homo sapiens
  DOMAIN (19)..(162): Ornithine decarboxylase antizyme domain identified by PFam, accession name ODC_AZ, E-value=5.5e-85, PFam score of 293.7
ARRDAAEVFLVSDPSGRMVKFSLQRILNSHCFAREKEGDKPSATIHASRTMPLLSLHSRGGSSSESDDRLNVTEELTSNDKTRILNVQSRLTDAKRINWRTVLSGGSLYIEIPGGALPEGSKDSFAVLLEFAEEQLRADHVFICFHKNREDRAALLRTFSFL

SEQ ID NO: 12235 - protein, 345 aa, Homo sapiens
  DOMAIN (198)..(341): Ornithine decarboxylase antizyme domain identified by PFam, accession name ODC_AZ, E-value=2.8e-54, PFam score of 188.6
  misc_feature (1)...(345): Xaa = X or * as defined in Table 2
FGVSVYLHDYNMRTNPGEMSESTVPTHPADKGWPQGPDAQPRGGPTPPPLPKTLSRTCRPMKQASGLLGTRGCPGLTISKPKKLKVRSKAAAGEKPSEPLPTRTPRPHPPPPQGDRACGLRMKGRRRHPHAPYCRRYGSPTSVLAVLVEANEDMVGSQLLLSELQENWQAVLAPLGQRAARDLDVEAAATQHCSPNWRTVLSGGSLYIEIPGGALPEGSKDSLPVLLEFAEEQLRADHVFICFHKNREDRGRXPVSPAVGCVGVPAPPLHSQPAGTVSLRGWGVRAGGSGRQGFXRLLPRAALLRTFSFLGFEIVRPGHPLVPKRPDACFMAYTFERESSGEEEE

SEQ ID NO: 12236 - protein, 331 aa, Homo sapiens
  DOMAIN (2)..(282): Ornithine decarboxylase antizyme domain identified by PFam, accession name ODC_AZ, E-value=4.7e-38, PFam score of 133.1
  misc_feature (1)...(331): Xaa = X or * as defined in Table 2
MVKSSLQRILNSHCFAREKEGDKPSATIHASRTMPLLSLHSRGGSSSESESVWMARDAPGEAAHCRRHPGPSPRGPPGSWGWRTPTARQRPGKTPAASREDASRFRGRGCQLRLWGSHAGSRSSFPDCVPRGGRRSAPDREDDRLNVNRGNXRSNRQDGGFFNVQSRLTEAQTALNWRNNCXSGGSLFNIKPAGGRRWPEGSKGQLLQFLLEFAEEKQLRADHVFICSHKNREDRSCLAPKLSAFLGLKILRPGHPLVPKETPDACFMALQRSRESLPGEEEEVGARLRGWAIPPPWGHPFVSRVGRNRRLAHLAWVCPHVVIVQINAHSQ

SEQ ID NO: 12237 - protein, 282 aa, Homo sapiens
QAENSHININKKDVHSETPSEGHQRKRPKDHSSSPAREQNWMENEFDELTEVGFRRWVITNSSELKKHVLTQCKEAKNLEKRLGELLTRITSLEKNINDLMELKNTARELHEAYTSINSWINQAEERLSEIEDQLNEIKREDKITEKMKNSTTVLVSTWGSQLEQNNLPHIISPLFHSTHDLNISFYGGCLLQACSSKLLQGLAEGGPLRLTRSASFFAAKLCLTKHFLPTEMILIKSRKTTPDTQPRRLYLLQGVVDQTSRKGPTALNIRQKTFAAAPPHR

SEQ ID NO: 12238 - protein, 102 aa, Homo sapiens
  misc_feature (1)...(102): Xaa = X or * as defined in Table 2
FFFEMESHSVIRLECSGVNSAYCNLTLPGSSGSPASAPPPQVGGTTGTHHHAQLIFVFLVETGFHHVGQDGLDLLNLVIRPPQPPKVLGXQAVLLPQHRPPK

SEQ ID NO: 12239 - protein, 93 aa, Homo sapiens
  misc_feature (1)...(93): Xaa = X or * as defined in Table 2
FFFFGDRVPLHSAAQAGVKWCNLGSLQPPAPGLKPFSCLSLPSSXDYRSLPPCPTHFCIFSRDEVSPSWPGWSPTPDLMNHPPRPPKVLGIQV

SEQ ID NO: 12240 - protein, 96 aa, Homo sapiens
  misc_feature (1)...(96): Xaa = X or * as defined in Table 2
FLEMESHSVAQAGVQWRDLGSLQPPPPGFKRFSCLSFPSSWDYRRPQPRPANFFVFLVETGFTILARLVSNSXPRDPPASASQSAGITGVTYRARP

SEQ ID NO: 12241 - protein, 230 aa, Homo sapiens
  misc_feature (1)...(230): Xaa = X or * as defined in Table 2
FFFFFLRQSLDSVTQAEVQWRRILGSLRPLQLPGLKXCCCLSLLSSXDYSYNPLPRLANFFVFCIFXXRRGFTMLARLLSNSXPCDLPTSASQSAGITGVSHHAPGLASPSLNNKVQSSVGAQRRHDEDNGSRAXVFFCFFFFKRFALVAXAGVQWRDLSSLQPLPLRFMXFSCLSLPSSXDHRCVPPHPANFFVFIXRDGVSPCQPGXSRSPDLAIRPPRPPKVLGLQA

SEQ ID NO: 12242 - protein, 93 aa, Homo sapiens
  misc_feature (1)...(93): Xaa = X or * as defined in Table 2
FFFFETESHSILSPRLECNGTISAHCNLRLPGPRDCPASASXVAGITGVCHHAWLIFVFLVETGFHHVGQAGLELLNLVIRLPQPPKVLGLQA

SEQ ID NO: 12243 - protein, 65 aa, Homo sapiens
  misc_feature (1)...(65): Xaa = X or * as defined in Table 2
LSLNWCIILYIYICIYVVCVVLFCHSCLSNMGTXFFLAGLLLFRICLCLFIFYFLLXXXLLFIMI

SEQ ID NO: 12244 - protein, 282 aa, Homo sapiens
  misc_feature (1)...(282): Xaa = X or * as defined in Table 2
MNKLFSILLGEKVDTQPNVLHNDPHARHSDDNGQNHLEGQMNFNADSSQFKDENTDIAEKLEEKVRILCWVMTGPQNLEKKAKHVKATWAQRCNKVLFMSSEENKDFPAVGLKTKEGRDQLYWKTIKAFQYVHEHYLXDADWFLKADDDTYVILDNLRWLLSKYDPEEPIYFGRRFKPYVKQGYMSGGAGYVLTREPLKRFVDALKTVKCTHSSSIEDLALGRCMEIMNVEAGDSRDTIGKGNFFHPFVPEHHFNLKGYLPRTFWYWNYNYYPPVEGPGLLL

SEQ ID NO: 12245 - protein, 92 aa, Homo sapiens
  misc_feature (1)...(92): Xaa = X or * as defined in Table 2
ECRRQRGVQXCNHSXQQLXPPGLMQSSLLSSPGSSDYRQVLLHSAEFXVFNLVEMGSYYVVQAGLKFLASSDPPALTSQWARITGMSHITRA

SEQ ID NO: 12246 - protein, 197 aa, Homo sapiens
  misc_feature (1)...(197): Xaa = X or * as defined in Table 2
MGIHHVGQASLELLTSGDLPASASQGRGVRLYYIEGRSSQSASVTALFLSSLPTVTSAMAGTRPPSARSHQTLQACRAQKTKTRMSSIXGTGAKHQASSPGKAPLSTPSPYFWKPSLQTSPCSGSRSLWASLPSPLAALFLCFWQDATXRSSTTRSSLPSWPSRSTRALRLSTSXPECAPSAXASSKAGERSTGDRL

SEQ ID NO: 12247 - protein, 164 aa, Homo sapiens
  misc_feature (1)...(164): Xaa = X or * as defined in Table 2
FFFLRCSVNSTAKAGVQCHNLSSLHPLPPGFKQFPCFSLPSSXDYGCAPPHPANFYIPSRISQAWWRVPVIPATQEARQSFNFVAQVGVQWHNLSSPQAFPAGFKXFSCLSLPTSWDYRHMPPCPDNFCIFSRGGVSPYWPSWSRTLDIMIHIPRPPNVLGLQA

SEQ ID NO: 12248 - protein, 156 aa, Homo sapiens
MLAGQQREFPVGVGSADPALGAAGWPQRPGQARDLQLAMPEPPIPSMGSCAAGASPTSTAPCSKAPSPIDHPRAAECRRRARDWQAAPPAAPVRDPLGEASRAPESVKDVCIYDIMFDGGAGRFAAATLGTISELPAFPEERKSWKPKRQAPGALV

SEQ ID NO: 12249 - protein, 108 aa, Homo sapiens
  misc_feature (1)...(108): Xaa = X or * as defined in Table 2
ETVSHSVAQAGVHWHHVGSQQPPSPGSKQFSNLSLPGGWDYRHPPPHPANFIFLVETGSHYVAKADLQLLASNDPPTSASQHAGIIGRSHCTRPRIYXWSNKLXYKIT

SEQ ID NO: 12250 - protein, 178 aa, Homo sapiens
  misc_feature (1)...(178): Xaa = X or * as defined in Table 2
ERQSCSVARAGVQWHDLGSPQPLPPRLKRFSCLNLLSSWDYRRALPHPGXFLYFXXRQGFTMLVRLVLNSXPCDPPTSASQSAGITGVSHRARPVLRFXQNYYYFETGSGSAAQAGMQWPIMAMQPQPPRLKQASNLSLLSSWDHGMQPHPANTTVCKTERKQVFRMHLLNNTNYREQ

SEQ ID NO: 12251 - protein, 65 aa, Homo sapiens
  misc_feature (1)...(65): Xaa = X or * as defined in Table 2
EAGSHSVAHAGEQWCDYGSLQHQPPVLKQFSHLSLPSSXDYRCVPPCPANFLIILMISVSIRGSV

SEQ ID NO: 12252 - protein, 221 aa, Homo sapiens
  misc_feature (1)...(221): Xaa = X or * as defined in Table 2
KTLLLSCYLSKLWPVDYLRSSRLLRRAASSFGSWRFALQRTPHTTRRLSRSSKAVQTAFPRRSPSSRHRCGSSSRATTTCRMSFLSSLTTCAQQLAGWVTLKRSIGLRKRSMSLMALKKWPCLMWKKRRSLPRYPQPQRTRGKKRSGSKIMIRRLNGQMGPRTVPAPAMKEVQITKLKKSKRRSCSHCSSKVCDSKSVQEQGAPXVGGQQPPPRGXSYAWC

SEQ ID NO: 12253 - protein, 167 aa, Homo sapiens
  misc_feature (1)...(167): Xaa = X or * as defined in Table 2
DSEPCSVAQAGEQXRDLGSLQPLSLGLKQFSCLCLPSSRDYRRPPPCLANFCYFXYRWGFTTSARPVXNSWPCDPPTSASQSAGTTGVSHQARLLLFFKAFKVWSGDSIXCVNEFNIISKISSFPSHFTSTPQSCPIMHSQIKYKXFXDYPXCSKQAGGISISDTYY

SEQ ID NO: 12254 - protein, 116 aa, Homo sapiens
  misc_feature (1)...(116): Xaa = X or * as defined in Table 2
KQGIIMTYVLRRPFFFSRWSLDSVSQAGVQWRVFGSLQAPPPGFLPFSCTGRQPPSPANFFLYFLVETGFLFXXRQGFTVLDRMVSISXPRDPPALASQSAGITGVSPRTRQEGHS

SEQ ID NO: 12255 - protein, 279 aa, Homo sapiens
  DOMAIN (84)..(130): Hexokinases proteins domain identified by eMATRIX, accession number BL00378E, p-value=7.818e-19, raw score of 22.92
  DOMAIN (102)..(273): Hexokinase domain identified by PFam, accession name hexokinase, E-value=2e-105, PFam score of 363.7
  misc_feature (1)...(279): Xaa = X or * as defined in Table 2
MVSISWPRDLPASASQSAGITGLIGALVLSVGIYAEVERHEIXNPXKCLPGSSHHPHPPGRRHVHGLLHWCAGVPPXQPPELLASLRLSRGYGLVLSWLEPRYEKMISGMYLGEIVRNILIDFTKKGFLFRGQISETLKTRGIFETKFLSQIESDRLALLQVRAILQQLGLNSTCDDSILVKTVCGVVSRRAAQLCGAGMAAVVDKIRENRGLDRLNVTVGVDGTLYKLHPHFSRIMHQTVKELSPKCNVSFLLSEDGSGKGAALITAVGVRLRTEASS

SEQ ID NO: 12256 - protein, 127 aa, Homo sapiens
  misc_feature (1)...(127): Xaa = X or * as defined in Table 2
YNFALKSELKFKNQAIVSLNKFFFFFFLRWSLRPVAQAGVQWRDLGSLQPPPPGLTPSSCLSLPSSWNRRRPPPCPAKSFWIFMXRRGFTVLARMVSISXPRDLPASASQSAGITGVSHRTRQEGHS

SEQ ID NO: 12257 - protein, 162 aa, Homo sapiens
  misc_feature (1)...(162): Xaa = X or * as defined in Table 2
GIYHTLRTGQEGRGSIKQQRLLQRPLPYFFLFIFPSFLYMIEIKHXLSFYILLFAFNIVSXPFSYFIFFFRFXDSVLLCGPGWSTVAXSXLTAASTSQDQGDSPTSGPLKVTDRVCGHHTXANFYIFCGGWGGLTILLRRIPNSWAQGIFPPWPPKVLGLQA

SEQ ID NO: 12258 - protein, 23 aa, Homo sapiens
LLFPIRRPFATRSSQKESSPKTP

SEQ ID NO: 12259 - protein, 236 aa, Homo sapiens
  DOMAIN (149)..(160): Trp-Asp (WD) repeat proteins proteins domain identified by eMATRIX, accession number BL00678, p-value=2.200e-10, raw score of 9.67
  DOMAIN (37)..(202): WD domain, G-beta repeat domain identified by PFam, accession name WD40, E-value=1.5e-47, PFam score of 171.4
LGASEPWQPRSQETPKHSWPSPHPANQSKEVPENPNYALKCTLVGHTEAVSSVKFSPNCENGLASSSADRLIIIWGAYDGKYEKTLYGHNLEISDVAWSSDSSRLVSASDDKTLKLWDVRSGKCLKTLKGHSNYVFCCNFNPPSNLIISGSFDETVKIWEVKTGKCLKTLSAHSDPVSAVHFNCSGSLIVSGSYDGLCRIWDAASGQCLKTLVDDDNPPVSFVKFSPNGKYILTAT

SEQ ID NO: 12260 - protein, 73 aa, Homo sapiens
MCGSVYSTIWSLIASRREETIRVIVLYIQSPNINTRHISKRGLNKGVNQFHKEDWNLLKRVCSHSGAEAGIFS

SEQ ID NO: 12261 - protein, 171 aa, Homo sapiens
  misc_feature (1)...(171): Xaa = X or * as defined in Table 2
NFELKLSPYQKKSIYWGAAQVMPVAVGKPSSEWPPGSHMDNSQIRGNPVCGIKXFSCPSLQCSWDYRCMTPCLANLFFFKLEGGFCHVAQTSLKLLGSSSPFILASRSTGITGMNHHARQLLNXSIREXHSITHRLTHSREKSCECNLYGKTLSSNFPPTKKKVSTGELPR

SEQ ID NO: 12262 - protein, 145 aa, Homo sapiens
  misc_feature (1)...(145): Xaa = X or * as defined in Table 2
HERKAQPAGEGRTHMTKSDSLPSFRVSTLPLESHHPDPNTMGGASHRDRALSGTATVRDTRGIDPAPVHASPTRNRNEGRHVFKRFPDTLTDRSISIYTDHHSLQIRTLRALSQLXTTPTQTPWAGPATGTGLSRGLPPYGTPEG

SEQ ID NO: 12263 - protein, 255 aa, Homo sapiens
  misc_feature (1)...(255): Xaa = X or * as defined in Table 2
FKTIIKVRFLCIRVYSLCCKLLTYCDHFHSLDFEECAHKLLKMEFPESQTKELCNMILDCCAQQRTYEKFFGLLAGRFCMLKKEYMESFEGIFKEQYDTIHRLETNKLRNVAKMFAHLLYTDSLPWSVLECIKLSEETTTSSSRIFVKIFFQELCEYMGLFXSLIARLKDGNLAPFFXRIFPRDDPRITRVAISFFPSIASGCLTYCPVSALSSIPLRPLVVALLLPIPIFHHDLLLELFRLPFFYNDTLVLPFV

SEQ ID NO: 12264 - protein, 292 aa, Homo sapiens
  DOMAIN (54)..(102): Ubiquitin-conjugating enzymes proteins domain identified by eMATRIX, accession number BL00183, p-value=1.000e-10, raw score of 28.97
  DOMAIN (8)..(175): Ubiquitin-conjugating enzyme domain identified by PFam, accession name UQ_con, E-value=2.6e-45, PFam score of 164.0
  misc_feature (1)...(292): Xaa = X or * as defined in Table 2
RCNSAQQQMTSSQKALMLELKSLQEEPVEGFRITLVDESDLYNWEVAIFGPPNTLYEGGYFKAHIKFPIDYPYSPPYTFRFLTKMWHPNIYENGDVCISILHPPVDDPQSGELPSERWNPTQQCEGLILLRCXSHWLNEPQHLSPQPMSDASVMFRKWRDSKGKDKEYGLKFIRETKFSATKARRQEKGGSXRFPTTLGGNTCIKTEVPRNDEQVQSLLYDELGMMTDIDDERXGRRKDADCYDDDDSGEXGSPQPWAGIPASKLRCPCNDEQVQSLLYDELGMMTDIDDER

SEQ ID NO: 12265 - protein, 70 aa, Homo sapiens
  misc_feature (1)...(70): Xaa = X or * as defined in Table 2
EGVXVSRDWXQWSDIGSWRHSMTGSGDSLASAFXVSGGTGESHHKQLIAVNMVEMGSHRAGQAGNELSTL

SEQ ID NO: 12266 - protein, 103 aa, Homo sapiens
  misc_feature (1)...(103): Xaa = X or * as defined in Table 2
DGVSLLLSPRLQWHNLGLLQPPPPXFKGFSCLSLPGSWDYRHVPPCLANFVFLVETGFRHVGQTGLELLTSGDPPASASQRAGITGVSHRTWQKMYFLSQKYF

SEQ ID NO: 12267 - protein, 102 aa, Homo sapiens
  misc_feature (1)...(102): Xaa = X or * as defined in Table 2
SCLSLLSSWDHRRVPAHPANFVFLVETGFHHVSQVGLELLTSSNPPASASHSAGITGVNHRAWLPGLNLRFXKMIIRRLRRLLKNKFHSTILRKSETSNSCE

SEQ ID NO: 12268 - protein, 207 aa, Homo sapiens
  misc_feature (1)...(207): Xaa = X or * as defined in Table 2
TYGEMAKIVDVPTKQLRAPDPIDSMLCHFCHNVSFPCTRNGCVDMEHFKVIKTHQIEDERERREKKLYFGYSLLGAHPILNQTIGRMQRATEGRKEELFALYSAHDVTLSPVLSALGLSEARFPRFAARLIFELWQDREKPSXTFVRILYNGVDVTFHTSFCQDHHKRSSKPMFPLENLVRFVKRDMFLALGGSCTNYYDACHREGF

SEQ ID NO: 12269 - protein, 173 aa, Homo sapiens
  DOMAIN (94)..(121): ALPHA-1-ACID GLYCOPROTEIN SIGNATURE domain identified by eMATRIX, accession number PR00708D, p-value=8.337e-09, raw score of 14.67
VIKILGTEKGKKNRTNLIFLSGNRVLKWMERSHGTEKALTALLKCGAEDHVEAVKKLQNSTKILQKNNLNLLRDLAVHIPHSLREQSRLGRCGHITQETLLFLTVGDEKGGGLFLLAGPPASVETLGPRVAEVLEGKGAGKKGRFQGKATKMSRRMEAQALLQDYISTQSAKE

SEQ ID NO: 12270 - protein, 96 aa, Homo sapiens
QRGVLLKTANVLVPEDLGREMRIFFSVKTWKTFTCIFTKGTNIHLFLFYFFFETASLSEAQAGAQLGSLQPPPPGGSSDSPASASPIAGITGACHH

SEQ ID NO: 12271 - protein, 409 aa, Homo sapiens
  DOMAIN (39)..(59): SYNTHETASE LIGASE PROTEIN ALANYL domain identified by eMATRIX, accession number PD01168H, p-value=1.000e-11, raw score of 12.08
  DOMAIN (38)..(217): tRNA synthetases class II (A) domain identified by PFam, accession name tRNA-synt_2c, E-value=1.4e-10, PFam score of 38.6
  misc_feature (1)...(409): Xaa = X or * as defined in Table 2
QRDSYAREFTTTVVSCCSAELQTGEGATARNIFLSGFQVVLEDTVLFPEGGGQPDDRGTINDISVLRVTRRGEQADHFTQTPLDPGSQVLVRVDWERRFDHMQQHSGQHLITAVADHLFKLETTSWEVGRFRSAIELDTPSMTAEQVAAIEQSVNEKIRDRLPVNVRELSLDDPEVEQVSGRGLPDDHAGPIRVVNIEGVDSNMCCGTHVSNLSDLQVVXILGTEKGKKNRTNLIFLSGNRVLKWMERSHGTEKALTGLLKCGAEDHVEAVKKLQNSTKILQKNNLKSAQRTXAVHIAHSLKEQSRLGRCGHITQEGGXFRVHEYHCQXRLGQRRPSLFLTCGRXERWWTLLYWQGHLRLWRPWGPGWLRSWEGKGAGKKGRFQGKATKLSRRMEAQALSPGLHQHAEC

SEQ ID NO: 12272 - protein, 101 aa, Homo sapiens
  misc_feature (1)...(101): Xaa = X or * as defined in Table 2
SRQWTLFADGQHSGPAAPCPCGEVXRTGALNPKTFQGLPSAPGPCPVPHGASHPXTPQKLQPGNKSQMKPVKPGFPPSGAGGAWASLXPSSLPFPDLQYLL

SEQ ID NO: 12273 - protein, 101 aa, Homo sapiens
  misc_feature (1)...(101): Xaa = X or * as defined in Table 2
FFFFFLXRQSCSVAQAGVQWYDPGSQKPPPPRFERFSCLNLPSSXDYRRPPSLPAIFVFLVETGFHHIGQDSLKLLASSDLPISASQSAGITGMSHCTWPV

SEQ ID NO: 12274 - protein, 192 aa, Homo sapiens
  misc_feature (1)...(192): Xaa = X or * as defined in Table 2
TAEKGGEETKSGELGRSQRTLSQVGATRGTSEEITLIVQMRDAGGSALCSGIGGGEKWSVLGVILKKDDRIVLAYCMGHEIKRGIEDDSKVFFFFFLEMKSCSVVQAGVQWHDLSSLQPALPRYKXFSCLSLPGSWDYRHVLLRLVNFXFLVEIGFHHVVQAGLKLLTSSDLPHSASRSAGITGVSHRARPG

SEQ ID NO: 12275 - protein, 164 aa, Homo sapiens
  misc_feature (1)...(164): Xaa = X or * as defined in Table 2
ETEDLALSPQAGVHWARSLSSLQPPPPGVFKQILCLSLLSSWDYRGPCHPHPAKFLAFXVETGVSPSWARLFLNSXPRDPPASASQSAGEPPRWASVCNSVKMLSSAFNWCVCRLHKEKWMRRQKTHTVMIPHSNRCSSRHFSRIPSSIETYNNLRHTLLAGRF

SEQ ID NO: 12276 - protein, 40 aa, Homo sapiens
  misc_feature (1)...(40): Xaa = X or * as defined in Table 2
ESGSHSLPKLXCSGAITAHCNLKLLGSRDPPTSASGVAGT

SEQ ID NO: 12277 - protein, 96 aa, Homo sapiens
  misc_feature (1)...(96): Xaa = X or * as defined in Table 2
RQRLNSVTHSGVQWRNPGSLQPLPPGFKHFSCLSLLSSWDYRHTPQCPAIFVFLVETGFRHARLVSNSXPHNLPVSASQSAWITGLSHHARPCVSF

SEQ ID NO: 12278 - protein, 99 aa, Homo sapiens
  misc_feature (1)...(99): Xaa = X or * as defined in Table 2
FLGWSFTLVVQAGVQWRDLGSPHPLPPGFKQFFCLSLPSSXDYRHAPPHLANFVFLGEMDFLHAWQAGLELLTSGDPPTLASQSAGITGVRHCSRPVSE

SEQ ID NO: 12279 - protein, 204 aa, Homo sapiens
  misc_feature (1)...(204): Xaa = X or * as defined in Table 2
PRVRTYRFGSVGHDTQLCLWDLTEDILFPHQPLSRARTHTNVMNATSPPAGSNGNSVTTPGNSVPPPLPRSNSLPHSAVSNAGSKSSVMDGAIASGVSKFATLSLHDRKEKAPRERSQSRNHSMGHNFXQEASDKLESSSPKPKPDPAKTLGTPLCPRMEDVPLLEPLICKKIAHERLTVLIFLEDCIVTACQEGFICTWGRPG

SEQ ID NO: 12280 - protein, 130 aa, Homo sapiens
  DOMAIN (10)..(24): DNA/RNA non-specific endonucleases proteins domain identified by eMATRIX, accession number BL01070D, p-value=8.800e-09, raw score of 13.05
  misc_feature (1)...(130): Xaa = X or * as defined in Table 2
IGFQPQLTEFQVSLQDLEKLSGLVFFPHLDRTSDIRNICSVDTCKLLDFQEFTLYLSTRKIEGARSVLRLDKIMDHLKNVXNEPYDYPMRRYYKKLQELTAIDLTSTHISQPSLLSYTTCLISGATPPFT

SEQ ID NO: 12281 - protein, 85 aa, Homo sapiens
  DOMAIN (60)..(73): bZIP transcription factors basic domain proteins domain identified by eMATRIX, accession number BL00036, p-value=7.429e-13, raw score of 9.02
  DOMAIN (50)..(85): bZIP transcription factor domain identified by PFam, accession name bZIP, E-value=0.0001, PFam score of 22.0
SFSISGSFSASIALVCQLLLAVKGSVFEVGGISYCPLNVFLLDLQVAPEEDERKKRRRERNKIAAAKCRNKKKEKTECLQKVSAF

SEQ ID NO: 12282 - protein, 105 aa, Homo sapiens
  misc_feature (1)...(105): Xaa = X or * as defined in Table 2
NASSLAWTVLLKLLVGFGAGQCMGNFFFCWGGAMESPSVAQAGVQWRNLGSLQPPPPGFKRFSCLSFPSSWDYRHVPPHPANFCIFSRDGVSRCWPGWSXTPDLR

SEQ ID NO: 12283 - protein, 106 aa, Homo sapiens
  misc_feature (1)...(106): Xaa = X or * as defined in Table 2
RRCLCAGYFKNVARRSCWRTFCTMDGRGSPVHIHPSSALHEQETKLEWIIFHEVLVTTKVYARIVCPIRYEWVRDLLPKLHEFNAHGFEQCGPTXSERRCKKEMDK

SEQ ID NO: 12284 - protein, 121 aa, Homo sapiens
  misc_feature (1)...(121): Xaa = X or * as defined in Table 2
LLITGRQYSLTFRRFYIHLRNKILNSGLGKPPLKLHFYTEAFFARNPDQMEFHSVAQAGVQWHDLGXLQPLPAGFKQFFCLRFLSSWDYKGTPPCLAGFCIFSRDEVSPRWRGWSXTPDLK

SEQ ID NO: 12285 - protein, 84 aa, Homo sapiens
  misc_feature (1)...(84): Xaa = X or * as defined in Table 2
MPPWDPCFPNHPAPKPHQPHPARLTDRHHPXPFPTHQLPCLLPAPSPGSLVVALSPQGHVYTNVEGTRSIRECSCTKNPFPGPI

SEQ ID NO: 12286 - protein, 277 aa, Homo sapiens
  DOMAIN (105)..(154): Eukaryotic RNA polymerase II heptapeptide repeat proteins domain identified by eMATRIX, accession number BL00115Z, p-value= 9.471e-09, raw score of 3.12
  misc_feature (1)...(277): Xaa = X or * as defined in Table 2
FLKRENLLKNVCRNKLDLRPNRASPTGSQEWRQHGVQSEVQFVHSLLKPGPPADSCRTAAGDPGGTETADPGHTGLELRFPEPPKPTLPLALSEAPVPPERGENTGPRSLPSTPMPSWGPLLSSPPRPATSPTSPSQANXPPPPRPSSHPPTTVPPTRPQPWQPGCCAQPPRPCLHXRGGNXVYXGMQLHQKSVSWPHSQWPQKREGNGSSHEIHPSCPPSGFHGPSPEGRMPTQAGALHSWVPGLSLSHGSGPHPPPRWTATVQAARPRVPPLTNL

SEQ ID NO: 12287 - protein, 222 aa, Homo sapiens
  misc_feature (1)...(222): Xaa = X or * as defined in Table 2
SRLGRDHVGPGLGGVGVRRRENDIGEYEGGRNEAGERHGRGRARLPNGDTYEGSYEFGKRHGQGIYKFKNGARYIGEYVRNKKHGQGTFIYPDGSRYEGEWANDLRHGHGVYYYINNDTYTGEWFAHQRHGQGTYLYAETGSKYVGTWVNGQQEGTAELIHLNHRYQGKFLNKNPVGPAKVCIXCWVXTTWXISFNRYGKRRRGRGGRISNCCSKMESYPNH

SEQ ID NO: 12288 - protein, 223 aa, Homo sapiens
  misc_feature (1)...(223): Xaa = X or * as defined in Table 2
GVQRGHFQEAKGSGRCLSSLNVPHPSPPSAGMDPSSPVPNPEEAGGPLAQVPSAALAQVAPGPVPISSLLEGPTPSLPFXERGNSSHKQASGPERGARPPALLGPQEIGGSSKYPPPGPGSTLGKGLLASPRCGPPQVLGWGLRDPTRLEEGPWGSLGNTPREPSIKCSPXMGRMGAQPLPKAEGAPPPTQLPPTHSPRRILGPLGASPERPPPRVVPPGGEG

SEQ ID NO: 12289 - protein, 113 aa, Homo sapiens
  misc_feature (1)...(113): Xaa = X or * as defined in Table 2
NFFFLRQSFNSVTQAGVQWRDLGSLQPLPSGFTPFSCLSLLSSWDYRHPPPHPANFLYFXXRRGFTLLARMVLISXPHDPPTSASQSAGITGVSHGAWPKSIFFLNAEVMLYY

SEQ ID NO: 12290 - protein, 176 aa, Homo sapiens
  misc_feature (1)...(176): Xaa = X or * as defined in Table 2
VCVCGFCFVLETESRSVTQAGLQRHHLCSLQPPPPGFKGFSCLSLPSSWDYRCPPPRLANFXFLVEMGFHHVGQAGLKLVASSDPPASVSQSAEMTGVSHHALPGXSRSVTQAGLQRHHLCSLQPPPPGFKGFSCLSLPSSWDYRCPPPRLANFCIFSRDGVSPRWSGWSQTRGLK

SEQ ID NO: 12291 - protein, 112 aa, Homo sapiens
  misc_feature (1)...(112): Xaa = X or * as defined in Table 2
MGITVFRXXXXXXMXXXXXXXXXXXXXXXXXXXXXXXXXXXXXXXXXXXXXXXXXXXXXXXXXXXXXXXXXXXXXXXXXXXXXXXXXXXXXXXXXXXXXXXXXXXXXXXXXS

SEQ ID NO: 12292 - protein, 282 aa, Homo sapiens
  DOMAIN (149)..(162): bZIP transcription factors basic domain proteins domain identified by eMATRIX, accession number BL00036, p-value=7.429e-13, raw score of 9.02
  DOMAIN (139)..(246): bZIP transcription factor domain identified by PFam, accession name bZIP, E-value=0.0058, PFam score of 15.8
  misc_feature (1)...(282): Xaa = X or * as defined in Table 2
SQARTAQLSSLAAARAHPSARAPAVSPRCSPAGQTNSPPDPVPTLAAPSGAWSKMMLQHPGQVSASEVSASAIVPCLSPPGSLVFEDFANLTPFVKEELRFAIQNKHLCHRMSSALESVTVSDRPLGVSITKAEVAPEEDERKKRRRERNKIAAAKCRNKKKEKTECLQLQYXQSHRPPLWHHQGFSEEEGLHFPKPSAALPSPIFLSQLDEPRCVQESEKLESVNAELKAQIEELKNEKQHLIYMLNLHRPTCIVRAQNGRTPEDERNLFIQQIKEGTLQS

SEQ ID NO: 12293 - protein, 94 aa, Homo sapiens
  misc_feature (1)...(94): Xaa = X or * as defined in Table 2
FFFFXDIRVSAQSPRLECSGAILAHCNLCLPGSSDSCASTSPVAGITGMCHHTQLIFFVFLVETGVHHVGRAGLELRLQVIHPPQPPKVLGLQA

SEQ ID NO: 12294 - protein, 554 aa, Homo sapiens
  misc_feature (1)...(554): Xaa = X or * as defined in Table 2
QTGLQATTKHSGFPVRMDNAVPIVPQAPAAQPLQIQSGVLTQGSCTPLMVATLHPQVATITPQYAVPFTLSCAAGRPALVEQDCRCTAGVAWKGLKQILLPSNFGQQLAWGXALHNSVQPTAMIPEAMGSGQQLADWRNAHSHGNQYSTIMQQPSLLTNHVTLATAQPLNVGVAHVVRQQQSSSLPSKRNKQSAPVSSKSSLDVLPSQVYSLVGSSPLRTTSSYNSLVPVQDQHQPIIIPDTPSPPVSVITIRSDTDEEEDNKYKPSSSGLKPRSNVISYVTVNDSPDSDSSLSSPYSTDTLSALRGNSGSVLEGPGRVVADGTGTRTIIVPPLKTQLGDCTVATQASGLLSNKTKPVASVSGQSSGCCITPTGYRAQRGGTSAAQPLNLSQNQQSSAAPTSQERSSNPAPRRQQAFVAPLSQAPYTFQHGSPLHSTGHPHLAPAPAHLPSQAHLYTYAAPTSAAALGSTSSIAHLFSPQGSSRHAAAYTTHPSTLVHQVPVSVGPSLLTSASVAPAQYQQQVATQSYIGSFRGSTIYTGYPLSPTKISQYCYL

SEQ ID NO: 12295 - protein, 36 aa, Homo sapiens
ELRYKRWPGWKADTPQAQTVKWVGVGKSRESMIQLF

SEQ ID NO: 12296 - protein, 342 aa, Homo sapiens
  DOMAIN (119)..(158): Adenylosuccinate synthetase GTP-binding site proteins domain identified by eMATRIX, accession number BL01266D, p-value=4.000e- 40, raw score of 15.21
  DOMAIN (1)..(303): Adenylosuccinate synthetase domain identified by PFam, accession name Adenylsucc_synt, E-value=9.2e-137, PFam score of 467.8
  misc_feature (1)...(342): Xaa = X or * as defined in Table 2
DRAHLVFDFHQAVDGLQEVQRQAQEGKNIGTTKKGIGPTYSSKAARTGLRICDLLSDFDEFSSRFKNLAHQHQSMFPTLEIDIEGQLKRLKGFAERIRPMVRDGVYFMYEALHGPPKKILVEGANAALLDIDFGTYPFVTSSNCTVGGVCTGLGIPPQNIGDVYGVVKAYTTRVGIGAFPTEQINEIGGLLQTRGHEWGVTTGRKRRCGWLGSMILRYAHMVNGFTALALTKLDILDVLGEVKVGVSYKLNGKRIPYFPGXPGRCFKKGRKLKYETLPGWKADTTGRPGRWEDLPPQAQTYIRFVENHVGSRSGYHYQSFLLVSVKWVGVGQVQESPMIQLF

SEQ ID NO: 12297 - protein, 48 aa, Homo sapiens
  misc_feature (1)...(48): Xaa = X or * as defined in Table 2
LLSSRDHRHVPPHPANFFCRDRGLAMLPRLALNSWAXAIHPPWPPKVL

SEQ ID NO: 12298 - protein, 106 aa, Homo sapiens
  misc_feature (1)...(106): Xaa = X or * as defined in Table 2
YVFSGDLAHQILNVSLGIRRLHLADVSVGICLAKLRIAPVPPHNESVFNRWRCPYSSCSYHHLITSHQFQPSELIKYWNHLQHNKHNACANAAXEKAGMYRHRRLH

SEQ ID NO: 12299 - protein, 192 aa, Homo sapiens
  misc_feature (1)...(192): Xaa = X or * as defined in Table 2
SRGVFFFLRQSFTLVAXAGVQWCDLGSLQPLPPRFKQFSCPASLVSWDYRHAPPHPANFFIFLVEDKGFSMLVRLGLELPTSGDLPASASQSPGITGVSHHARPXMILFIFMFSFGRRDGVSVTQAGVQWHDLGSLQASPSGFMPFSCLSLPSSWDYRHVXPCQANFLYFXXANLSRVSPCWSGWSRTPNLK

SEQ ID NO: 12300 - protein, 111 aa, Homo sapiens
  misc_feature (1)...(111): Xaa = X or * as defined in Table 2
VRHRFTLVPQAGVQXCSLGXQQSPPPWFKQFSCLSLPRSWDYRHLPPHPANFFVFVEKTGFHHVGQAGLELLTSVDPPASASQSAGLTGLSHHAQLSFNLSAKKSFTKTRS

SEQ ID NO: 12301 - protein, 134 aa, Homo sapiens
NSEAAQAFLCKNGDPQTSIFDHLVAIERAGRAADGNYYNARKMNIKHLVDPIDDLFLAAKKIPGISSTGVSNWGGYALACALYILYSCAVHSQYLRKAVGPSRAPGDQAWTHALPSVIKEEKMLGILVQHNSRS

SEQ ID NO: 12302 - protein, 615 aa, Homo sapiens
MAGELRPASLVVLPRSLAPAFERFCQVNTGPLPLLGQSEPEKWMLPPQGAISETRMGHPQFWKYEFGACTGSLASLEQYSEQLKDMVAFFLGCSFSLEEALEKAGLPRRDPAGHSQAGAYKTTVPCVTHAGFCCPLVVTMRPIPKDKLEGLVRACCSLGGVSRGKGPEQGSKALAAVSGLGLQMPLRFKELLGIKELSKPAYGDAMVCPPGEVPVFWPSPLTSLGAVSSCETPLAFASIPGCTVMTDLKDAKAPPGCLTPERIPEVHHISQDPLHYSIASVSASQKIRELESMIGIDPAKLESQWKRFDHLVAIERAGRAADGNYYNARKMNIKHLVDPIDDLFLAAKKIPGISSTGVGDGGNELGMGKVKEAVRRHIRHGDVIACDVEADFAVIAGEHSDGRPVRPATQGVSNWGGYALACALYILYSCAVHSQYLRKAVGPSRAPGDQAWTQALPSVIKVTNPSQPLAWKQLLPWMSSRPEVPSQQAPPPTPIPGSNPPPLGLLKEMGPAPLGGEAGGPDLRDIHNASVLNGTPTWGIFPGQVLSTHGDMDVEYAISPGHSSHVEEKMLGILVQHKVRSGVSGIVGMEVDGLPFHNTHAEMIQKLVDVTTAQV

SEQ ID NO: 12303 - protein, 70 aa, Homo sapiens
LRAPGDQAWTQALPSVIKEEKMLGILVQHKVRSGVSGIVGMEVDGLPFHNTHAEMIQKLVDKGQHFSGAF

SEQ ID NO: 12304 - protein, 181 aa, Homo sapiens
NQPHFVNACCVPRTLLSALLEEKMLGILVQHKVRSGVSGIVGMEVDGLPFHNTHAEMIQKAGGRHHGTGVTVHVPCEQSPYQRAGLHPGRMQLLLATILLVNTGLRQPTWSPVRIFSTVTYGDTCEQLTARQSMRTNIPRPCRIRYSRLQSSSPIHGFCYSWFQLLIANCRPKILNEKFQK

SEQ ID NO: 12305 - protein, 820 aa, Homo sapiens
MAGELRPASLVVLPRSLAPAFERFCQVNTGPLPLLGQSEPEKWMLPPQGAISETRMGHPQFWKYEFGACTGSLASLEQYSEQLKDMVAFFLGCSFSLEEALEKAGLPRRDPAGHSQAGAYKTTVPCVTHAGFCCPLVVTMRPIPKDKLEGLVRACCSLGGVSRGKGPEQGSKALAAVSGLGLQMPLRFKELLGIKELSKPAYGDAMVCPPGEVPVFWPSPLTSLGAVSSCETPLAFASIPGCTVMTDLKDAKAPPGCLTPERIPEVHHISQDPLHYSIASVSASQKIRELESMIGIDPGNRGIGHLLCKDELLKASLSLSHARSVLITTGFPTHFNHEPPEETDGPPGAVALVAFLQALEKEVAIIVDQRAWNLHQKIVEDAVEQVWGMTCRVFLAIRGSPGPPELGRVVEYEVAERLRQQSHLVVMGRAAPGAPSLAWRRLPDSTQSWVLSLVLMGAQRVEFAILDFTELTLHLHEESVLKTQIPILTYQGGSVEAAQAFLCKNGDPQTPRFDHLVAIERAGRAADGNYYNARKMNIKHLVDPIDDLFLAAKKIPGISSTGVGDGGNELGMGKVKEAVRRHIRHGDVIACDVEADFAVIAGEHSDGRPVRPATQGVSNWGGYALACALYILYSCAVHSQYLRKAVGPSRAPGDQAWTQALPSVIKVTNPSQPLAWKQLLPWMSSRPEVPSQQAPPPTPIPGSNPPPLGLLKEMGPAPLGGEAGGPDLRDIHNASVLNGTPTWGIFPGQVLSTHGDMDVEYAISPGHSSHVEEKMLGILVQHKVRSGVSGIVGMEVDGLPFHNTHAEMIQKLVDVTTAQV

SEQ ID NO: 12306 - protein, 309 aa, Homo sapiens
  misc_feature (1)...(309): Xaa = X or * as defined in Table 2
LESMIGIDPGNRGIGHLLCKDELLKASLSLSHARSVLITTGFPTHFNHEPPEETDGPPGAVALVAFLQALGRRSPXSLTREPVILHQKIVEDALSKVFXRRRSRYXLTKVDQWKLLRHSCAKIGDPQTLRFDHLVAIERAGRAADGNYYNARKMEHQALRLTPFDDLFLSAKKIPGISSIGVGDGGNELGMGKVKEADEEAHTARGCHRLATWKAEFAVIAGVSNWGGYALACALYILYSCAVHSQYLRKAVGPSRAPGRFRPGLRPSRRSLRKKKCWASWCSTKSGVASRASWAWRWMGCPSTTPTPR

SEQ ID NO: 12307 - protein, 146 aa, Homo sapiens
GNEFSILKSPGSVVFRNGNWPIPGERIPDVAALSMGFSVKEDLSWPGLAVGNLFHRPRATVMVMVKGVNKLALPPGSVISYPLENVDLLFLSELQVLHDISSLLSRHKHLAKDHSPDLYSLELAGLDEIGKRYGEDSEQFRDASKI

SEQ ID NO: 12308 - protein, 182 aa, Homo sapiens
GNEFSILKSPGSVVFRNGNWPIPGERIPDVAALSMGFSVKEDLSWPGLAVGNLFHRPRGYPSWVMVKGSGTKLALTPQAVVISYPLENRVYMVGKANSVFEDLSVTLRQLRNRLFQENSVLSSLPLNSLSRNNEVDLLFLSELQVLHDISSLLSRHKHLAKDHSPDLYSLELAGLDEIGKRY

SEQ ID NO: 12309 - protein, 362 aa, Homo sapiens
  misc_feature (1)...(362): Xaa = X or * as defined in Table 2
ILKSPGSVVFRNGNWPIPRERDPPDVAALSHGLPLXKKDLSWPGLAVGNLFHRPRATVMVNVNGVNKLDLPPGSGISYPLENAVPFSLDSVANSIHSLFSEETPVVLQLAPSEERVYMVKGRANSVFEDLSVTLRHSRNRLVFKKTLFLSFTPPQILLSRNNEVDLLFLSELQVLHDISSLPSRPKHLARDHSPDLYFTGSWAGLDEIGKALLGEDSEQFRDASKILVDALQKFADDHVPVFMVGNPVVELVHCPSHLNTSPPLGKTRDLPLRPKQAQEPQQVPYNLAYKYNFEYSVVFNMVLWIMIALALAVIITSYNIWNMDPGYDSIIYRMTNQKISEWIECYLWPRIRKRGFGNWLFC

SEQ ID NO: 12310 - protein, 75 aa, Homo sapiens
  misc_feature (1)...(75): Xaa = X or * as defined in Table 2
MAEHHWAFPIPSXASXGFAXLQPTKATLKKXEGFKXFXKKKKKKKTPEGGAXGTXIXXPXGGAGXNKXPXGXXXG

SEQ ID NO: 12311 - protein, 192 aa, Homo sapiens
  misc_feature (1)...(192): Xaa = X or * as defined in Table 2
NVAGTAICSFAPGRRQTPCHTREPQDGRPRARLTAWTRARGTCRVAHTHTGRQNHPMPLWGFSRHHRAFSEHLSLGCAPPSATWTXTRSPAAAAAGPPVPRKPNPSPPSRSPAGLRPPGRAGPLTSPRCPGPPASQASDTVGPVRHKQRGPTSDVSGAWDGPATAASGPVVRLYPSTLGGRGRQITRSADKT

SEQ ID NO: 12312 - protein, 125 aa, Homo sapiens
  misc_feature (1)...(125): Xaa = X or * as defined in Table 2
RLTSELAQTLAVHPSKSARPRPXAGEKPGKKPPLQVNGAWDXXPRVGADPGHSPDSLDPSTGDVQGGSYSYWEGRTITMPLWGFPDRAGLLGSPGSSGPGKRRPILAGQPYKLLELQARFLGPGH

SEQ ID NO: 12313 - protein, 171 aa, Homo sapiens
  misc_feature (1)...(171): Xaa = X or * as defined in Table 2
APPSATWTXTRSPAAAAAGPPVPRKPNPSPPSRSPAGLRPPGRAGPLTSPRCPGPPASPGIGHCGCRQTQAAWPRRRTYQGRGMGPRPRPRRPVVPVGGERSHSHPSGPPLRSPGPEWGLTSSSCPARGPGGCLCPQNQLPNPGPSGPASPNLPSPRLHPTDTSGPGFPRA

SEQ ID NO: 12314 - protein, 532 aa, Homo sapiens
  DOMAIN (345)..(380): Prion protein domain identified by eMATRIX, accession number BL00291A, p-value=6.897e-09, raw score of 4.49
  misc_feature (1)...(532): Xaa = X or * as defined in Table 2
RNFPDRPTRPRTRGRTRGRTRVRTFGPGPVASAGCSRGDGRFGEAGPTALDSGADSGVRDTLPVHEPGSCLRYYRTPRPRSRAHPTPLIRPTSGPRCFGSDGTHSVRCPVNAGRPGHLGLGGAKSSGFAGQKGRLLLAAGTCGVHVQGPLRAARPQEVLIFQGGPLQPAAPEQPPATGAWLQPRLRCSEKALXLPXGAPSQSPPRPMQPITVPASGXNAGGPGASGGTRVPGXKLPDTGGPSAQHPLSPTGLPHDARPPSSCPTGRSCVHCPQLNAVHLXEXPANSELSRPLSEDTGPXAAPTRPGSAGPISDPHSPPPSSPSSSGTPALPGHMSSGGKWYQHQPSACPVLGLPPDPGAEKAGSQPSPGHLVQAPGHPGPPGPHTPAVTPSFPNSRAALPSFSPRXPCPQSPKPQGSCDPRPPRKPKPWKFQGSLXGLPLQKNRPPFSPRTGATPGEPPGALPLSGNPPKSHRDGSALPSMSMSHPARPSVLGSKLSGFLPSSWPGPCTFXWMKCGRTRSIRGHSCAWLKAA

SEQ ID NO: 12315 - protein, 519 aa, Homo sapiens
  DOMAIN (240)..(255): RIBOSOMAL PROTEIN P2 SIGNATURE domain identified by eMATRIX, accession number PR00456E, p-value=5.557e-09, raw score of 3.06
  misc_feature (1)...(519): Xaa = X or * as defined in Table 2
RRSRDSGYRAPPASHSRPGQAARAPAPRPARREVCCPRPGVPRRARTTRKTPTWAAVATGTRGASAEGGPTGLAHGSGLAAAAGLMGCEPASGWGPGRQGSGARTAAGSSGSSSGSGPSAPTSSSVLGSGLVAPVSPYKPGQTVFPLPPAGMTYPGSLAGAYAGYPPQFLPHGVALDPTKPGSLVGAQLAAAAAGSLGCSKPAGSSPLAGASPPSVMTASLCRDPYCLSYHCASHLAGAAAASASCAHDPAAAAAALKSGYPLVYPTHPLHGVHSSLTAAAAAGATPPSLAGHPLYPYGFMLPNDPLPTSATGCRPTGRATSASPRPKSCXATSRTHTAFPGTDKLLSGYPSSSSLASAAAAAMACHMHIPTSGATGQPWDAGAAQPPPRGWDSAAATTPTPRAALPTPGAPVPVPAATGPYYSPYALYGQRLTTASAAGVSVRGGREGERGIGRKRGRGGVQGEAASRTRLLTPARGEGLGPRKERNVLPYISYPTAATETRWDTPLLPTFTSHTQTL

SEQ ID NO: 12316 - protein, 300 aa, Homo sapiens
  misc_feature (1)...(300): Xaa = X or * as defined in Table 2
VVAWRGSDSFSGLTSKLVQRQVFHHQLLKTVPHQAHPYXLPRAALQQIHRCXLPRDTSQVAASLLASKSSSQTSGSLVSKSTSLASVSQLASKSSSQTSTSQLPSKSTSQSSESSVKFSCKLTNEDVKHEATFFLIRLYKTVAWKLVAVGGFSPNVNHGELLNAAIEALKATLDVFFVPLKELADLPQNKSSQESIVCELRCKSVYLGTGCGKSKENAKAVASREALKLFLKKKVVVKICKRKYRGSEIEDLVLLDEESRPVNLPPALKHPQELLXCVQNITAYNIWYLKRKTDFCIVXN

SEQ ID NO: 12317 - protein, 70 aa, Homo sapiens
RLSERRNWTPQAMLYLKGAQGRRYLLRPEPANGPLRPAHCRIDHAPISTYYILRRPEPSYRSSSYFPDDD

SEQ ID NO: 12318 - protein, 719 aa, Homo sapiens
  misc_feature (1)...(719): Xaa = X or * as defined in Table 2
KESRRTVRRMLRGRSLSVTSLGGLPQWEVEELPVEELLLFEVAWEVTNKVGGIYTVIQTKAKTTADEWGENYFLIGPYFEHNMKTQVEQCEPVNDAVRRAVDAMNKHGCQVHFGRWLIEGSPYVVLFDIGYSAWNLDRWKGDLWEACSVGIPYHDREANDMLIFGSLTAWFLKEVTDHADGKYVVAQFHEWQAGIGLILSRARKLPIATIFTTHATLLGRYLCAANIDFYNHLDKFNIDKEAGERQIYHRYCMERASVHCAHVFTTVSEITAIEAEHMLKRKPDVVTPNGLNVKKFSAVHEFQNLHAMYKARIQDFVRGHFYGHLDFDLEKTLFLFIAGRYEFFKTKGADIFLDSLSRLNFLLRMHKSDITVVVFFIMPAKTNNFNVETLKGQAVRKQLWDVAHSVKEKFGKKLYDALLRGEIPDLNDILDRDDLTIMKRAIFSTQRQSLAPVTTHNMIDDSTDPILSTIRRIGLFNNRTDRVKVILHPEFLSSTSPLLPMDYEEFVRGCHLGVFPSYYEPWGYTPAECTVMGIPSVTTNLSGFGCFMQEHVADPTAYGIYIVDRRFRSPDDSCNQLTKFLYGFCNMSRRQRFIQRNRTERLSDLLDWRYLGRYYQHARHLTLRQSFSKINFHVGTXHAPPTDRKDFKYPRPSCSYPPFSFQGSSGPSSPQSSDVEDEVEDERYDEEEEAERDRLNIKSPFSLSHVPHGKKKLHGEYKN

SEQ ID NO: 12319 - protein, 449 aa, Homo sapiens
MKRLLERRNWTPQAMLYLKGAQGRRFISDQSRRKDLSDRPLPESVSSPERRGSEAPSDTVRPRAARVGSSSSWMPSAGAGSSRVQPRANGGKGGPGWRCGSPSLIGLRLFSQPSGCQERRSPNPQLLTIPEAATILLASLQKSPEEQFSSKAIWEGAVEVQRKASESKQFEKCLHKEEQPKAVSEPEWREEGIRACEGVYGERLVTQKKIDPICSKLKVILHPEFLSSTSPLLPMDYEEFVRGCHLGVFPSYYEPWGYTPGGLGPFPPLSAYKDIGAGLKPSFGLFPLAAECTVMGIPSVTTNLSGFGCFMQEHVADPTAYGIYIVDRRFRSPDDSCNQLTKFLYGFCKQSRRQRIIQRNRTERLSDLLDWRYLGRTEGFKYPRPSSVPPSPSGSQASSPQSSDVEDEVEDERYDEEEEAERDRLNIKSPFSLSHVPHGKKKLHGEYKN

SEQ ID NO: 12320 - protein, 90 aa, Homo sapiens
  misc_feature (1)...(90): Xaa = X or * as defined in Table 2
QTEGFKYRRPSSVPPSPSGSQASSPQSSDVEDEVEDERYDEEEEAGFGRYVXESPSILYAVPYSDSCCQVTPSLHCSHFFILFPKTDKSS

SEQ ID NO: 12321 - protein, 253 aa, Homo sapiens
  DOMAIN (150)..(165): RETINOIC ACID RECEPTOR SIGNATURE domain identified by eMATRIX, accession number PR00545A, p-value=5.785e-09, raw score of 5.35
WQGQKDRERERREEKKREGRETRGDTRGETRGETGEGEERTKRERGGERDTREERDERERERERETRHERREREERERERERERERESEREREERERQRERETETEREKKRERERERERERERERERERERERDRERERERERERERERKREREQRERERERDRERERKREREREREKEREREREKERGREREREREERERERGRKRERGDRTEREKERGRERESTQAMFPGQPKTRALAIVFPANVRQINGD

SEQ ID NO: 12322 - protein, 68 aa, Homo sapiens
SNQIRQMEEVKISKKSKVGILPFVAEFEEFAGLAESIFKNAERRGDLDKAYTKLIRGVFVNVEKVANE

SEQ ID NO: 12323 - protein, 466 aa, Homo sapiens
  misc_feature (1)...(466): Xaa = X or * as defined in Table 2
PSVRRNQRFLXSCKDFDYWHNXRKQEGCYTVLEKKVLSNRKQRVFDGSSGKLTGSTSSLNKLSVQSSGNRRSQSSSLLDMGNMSASDLDVADRTKFDKIFEQVLSELEPLCLAEQDFISKFFKHSNIKVCLELWAGSRGPGMGGTIITATXLLGTPLPVSSEKDMIRQMMIKIFRCIEPELNNLIALGDKIDSFNSLYMLVKMSHHVXLQQNVDPASFLSTTLGNVLVTVKRNFDKCISNQIRQMEEVKISKKSKVGILPFVAEFEEFAGLAESIFKNAERRGDLDKAYTKLIRGVFVNVEKVANESQKTPRDVVMMENFHHIFATLSRLKISCLEAEKKEAKQKYTDHLQSYVIYSLGQPLEKLNHFFEGVEARVAQGIREEEVSYQLAFNKQELRKVIKEYPGKEVKKGLDNLYKKVDKHLCEEENLLQVVWHSMQDEFIRQYKHFEGLIARCYPGSGVTMEFT

SEQ ID NO: 12324 - protein, 130 aa, Homo sapiens
  misc_feature (1)...(130): Xaa = X or * as defined in Table 2
FFFFLRWSLASVTQAGVQWRGLGSWQRPPPGFKSFSCLSLLSSWDYRRPPHAQLIFVFLVETSFTMLAGMVSISXPRDPPASASQSAGITGVSHRARLTLLIFKRCSIRDESFEVFLYVYLFKTNILLKA

SEQ ID NO: 12325 - protein, 99 aa, Homo sapiens
  misc_feature (1)...(99): Xaa = X or * as defined in Table 2
KTLQSGCPRLEVQWCNLGSLQPLPFPGSKXFSCLSLPGSWDYRSVPPRSANFXFLVETAFHHVGQAGLELSTSGDPPVSASQSAGITGVSHSARQXRAF

SEQ ID NO: 12326 - protein, 128 aa, Homo sapiens
  misc_feature (1)...(128): Xaa = X or * as defined in Table 2
RATPRHIIVRFTKVEMKEKMLRAAREKGRVTLKGKPIRLTADLSAETLQSRREWGPIFNILKEKNFQPRISYPAKVSFISERXIKYFTDKQMLRDFLTSRPALKELLKEALNMERNNRYQPLQNHAKM

SEQ ID NO: 12327 - protein, 192 aa, Homo sapiens
  DOMAIN (73)..(107): Chaperonins clpA/B proteins domain identified by eMATRIX, accession number BL00870G, p-value=6.553e-27, raw score of 8.07
  DOMAIN (1)..(191): Chaperonin clpA/B domain identified by PFam, accession name clpA_B, E-value=5.7e-15, PFam score of -28.7
  misc_feature (1)...(192): Xaa = X or * as defined in Table 2
VAAKCMHKDAKKGFIRLDMSXFQERHEVAKFIGSPPGYVGHEEGGQLTKKLKQCPNAVVLFDEVDKAHPDVLTIMLQLFDEGRLTDGKGKTIDCKDAIFIMTSNVASDEIAQHALQLRQEALEMSRNRIAENLGDVQISDKITISKNFKENVIRPILKAHFRRDEFLGRINEIVYFLPFCHSELIQLVNKEC

SEQ ID NO: 12328 - protein, 538 aa, Homo sapiens
  DOMAIN (95)..(144): Chaperonins clpA/B proteins domain identified by eMATRIX, accession number BL00870F, p-value=4.833e-36, raw score of 8.73
  DOMAIN (19)..(263): Chaperonin clpA/B domain identified by PFam, accession name clpA_B, E-value=3.5e-16, PFam score of -8.3
MKLLRTSEAKYQEKQRKREAEERRRFPLEQRLKEHIIGQESAIATVGAAIRRKENGWYDEEHPLVFLFLGSSGIGKTELAKQTAKYMHKDAKKGFIRLDMSEFQERHEVAKFIGSPPGYVGHEEGGQLTKKLKQCPNAVVLFDEVDKAHPDVLTIMLQLFDEPLDGIQVHSYDQTRMCPLGALCLVDRWKGDMVVAGILHFVCHSLSSEAYVYQFNPFNNPPKLAIITASIEQMWKLKQKSALWDQEVEEDLGHALPGQSPWLARLKFFDHKGSSSGSGRGSSCCLDCKVIHLAKCHLLAVDVPSSAAWLQTLCQNPLRKGSWTLEPTNNPPELSALEMLENSLCSPTWEGSQFWVTVQRTEAVEHCGLHASYVLRVEAERLTLLTMGAQSQTAQGNDIFQADETAIHRQKAQGKARQGHNALRADSHERKVVEGKFSSPPGPQELLESPPALYAEPLDSLHIASGPSQGSLYSDLLDGTLARAGEGVQWKKPLYWDLYEHEQQQLLKAKLTDPKEDPIYDEPEGLAPALPQGLYDLP

SEQ ID NO: 12329 - protein, 40 aa, Homo sapiens
  misc_feature (1)...(40): Xaa = X or * as defined in Table 2
MTLTSIDPVLTTFFNLECPLVFTATASSGLGEVEXAIALN

SEQ ID NO: 12330 - protein, 474 aa, Homo sapiens
  DOMAIN (53)..(87): Chaperonins clpA/B proteins domain identified by eMATRIX, accession number BL00870G, p-value=6.262e-19, raw score of 8.07
  DOMAIN (13)..(260): Chaperonin clpA/B domain identified by PFam, accession name clpA_B, E-value=0.0037, PFam score of -226.9
  misc_feature (1)...(474): Xaa = X or * as defined in Table 2
MPESNCSLTWRHSVGRAVAAQGGEHSSQGASLVLGEPRGGSSWLLGLEGDTGLWGGLLKEGRLTDGKGKTIDCKDAIFIMTSNVASDEIAQHALQLRQEALEMSRNRIAENLGDVQISDKITISKNFKENVIRPILKVRGLSWHFLLEPKAHFRRDEFLGRIGEIVYFLPFCHSELIQLVNKELNFWAKRAKQRHNITLLWDREVADVLVDGYNVHYGARSIKHEVERRVVNQLAAALXSRTLLPGGCTLRITVEDSDKQLLKSPELPSPQAEKRLPKLRLEIIDKDSKTRRLDIRAPLHPEKGRLTDGKGKTIDCKDAIFIMTSNVASDEIAQHALQLRQEALEMSRNRIAENLGDVQISDKITISKNFKENVIRPILKVRGLSWHFLLEPKVLTTFFNLSVLYLHGNSIQRLGEVNKLAVLPRLRSLTLHGNPMEEEKGYRRARGHSLHQGIEKYICESDDIFRKYCNNQFL

SEQ ID NO: 12331 - protein, 51 aa, Homo sapiens
  DOMAIN (7)..(42): Matrix protein (MA) p15. domain identified by eMATRIX, accession number PF01140D, p-value=9.438e-10, raw score of 15.54
MSRGWAASCRIRHEERERERERERERERERERERAEQCLLLLGALRPRASP

SEQ ID NO: 12332 - protein, 214 aa, Homo sapiens
  misc_feature (1)...(214): Xaa = X or * as defined in Table 2
FFKKNLCASAHYYTWCVPLPFFFFLRQGLNSIGQAGVQWCNHSSLQPCPPRLKLSLHLSLPSSWDHRHAPLRMTNFFKYLRRGLPVLPRLVSNSWAQVVLPSSASQSIGITDMSHXPAQLPNSLPFFKRQFRSISPGLGMQXCDHSSLXPQTLGLKQFSHQPPFYFFVQMGSCYVAPSWSXTPKENTTIIQHPHMYTLKTTVTFLYTELYSDIA

SEQ ID NO: 12333 - protein, 98 aa, Homo sapiens
  misc_feature (1)...(98): Xaa = X or * as defined in Table 2
RQSCSVAXAAVQWRDLSSLQPPPLGFKRFSCLSLLSSWDYRRPPPRSVNFXKIFLIETGFHHLGQAGVERLTSDPPGSASQSAGIIGISHCTWPELFK

SEQ ID NO: 12334 - protein, 155 aa, Homo sapiens
  misc_feature (1)...(155): Xaa = X or * as defined in Table 2
APMPAATMTARSGPAAISTRCPWRPRSPSTPRPSWSGTCCAPTRSLRRAATASQGPSPATNTPSPRAASPPXRVWAPRTETIKGHTAHSLRTGATTGPKLSAPVATESGHPDSQKPPTHPGTSDTILPPETASHPSTRRPXLPPETASHPSTRRP

SEQ ID NO: 12335 - protein, 112 aa, Homo sapiens
  misc_feature (1)...(112): Xaa = X or * as defined in Table 2
KRGFCWVPQVGGQGHDFGLWQSPFPGLRQFSGFFLWKSWDYGHPPPCXISSSSSSSSSFSSSSSSSLKLWTXGDPLAXVSQRVGIPGLSHWPXPRLGGRGTILVYGNLHFRD

SEQ ID NO: 12336 - protein, 97 aa, Homo sapiens
  DOMAIN (23)..(62): kw TRANSCRIPTASE REVERSE II ORF2 domain identified by eMATRIX, accession number DM01354X, p-value=2.042e-09, raw score of 13.86
  misc_feature (1)...(97): Xaa = X or * as defined in Table 2
KINMGILLKLVYRFNINPVKTPAGLFSSSSHEITEIDKRILKFIWKCTEHRIAKQSLKRTKLEDFLLNFKTYYEATEIKTSXYRFNINPVKTPAGLF

SEQ ID NO: 12337 - protein, 97 aa, Homo sapiens
  misc_feature (1)...(97): Xaa = X or * as defined in Table 2
FGFQINVFKDPVADPNKRSKKGRLSLHRTPAGNFVTLEXGKGDLEEYGQDLLHTVXKNGKVTKAYSFDEIRKNAQLNIELEAARSLGLMDWVCVVCM

SEQ ID NO: 12338 - protein, 51 aa, Homo sapiens
LLPLQDKSEATRGALSQRPCRPRPNSLPLNLPEEETLRIARIFSSQYSQKD

SEQ ID NO: 12339 - protein, 358 aa, Homo sapiens
  misc_feature (1)...(358): Xaa = X or * as defined in Table 2
ERCTMPDEPLVRAPDKGTDSPSPPPLEETSNGGRMLHESLRHAVPITRMQSSEDTEAGPAYSDEDYEEDIIEPRTLNEITTVTDKTSPWSSVISDTSEVISPQPDEVQREGPSCPSPGPFCREELMVKSSFLSSPERAVNPHLPRQDSPSQSLVACECEASKARVGGESASANPQPIPCPTLSGAQQSSTFVGWSSPQTDQNKEPKSEAPAEELKVATSXGSVDSAXLAFKKLPLNLASQSRRENHKGPPIDSSDIRQRQVTTGSETSTKQSLLLPGPIVVPNFFLPPQQLEASLRMLSLSATLPPAATTDQDKSEATRGALSQRPCRPRPNSLPLNLPEEETLRIARIFSSQYSQKD

SEQ ID NO: 12340 - protein, 378 aa, Homo sapiens
  misc_feature (1)...(378): Xaa = X or * as defined in Table 2
AIVEDKHSGRSYDITSDLGNVLTSTSIAKTVNGXAESSDSGAESDEEDAQEDLMGAYHSDIDKKMMKIVADHKNLEVIVTNGYDKDGFVHDIQNDIHASSSLNGRSTVHVKPIDENLGQTGKSAVCIHQDINDDHVEDVTGIQHLTSDSDSEVYCDSMEQFGQEESLDSFTSNNGPFQYYLGVHSSPPMENSGFREDIQGPPGNGNIGNMQVVAVEGKGEVKHGGEDGRNNSGAPHREKRAGETDEFSNVRRGRGHRMQHLSEGTKGRQVGSGGDGERWGSDRGSRGSLNEQIALVLMRLQEDMQNVLQRLQKLEMLTALQAKSSTSTLQTAPQPTSQRPSWWPFEMSPGVLTFAIIWPFIAQWLVYLYYQRRRRKLN

SEQ ID NO: 12341 - protein, 87 aa, Homo sapiens
  DOMAIN (52)..(64): THIOREDOXIN FAMILY SIGNATURE domain identified by eMATRIX, accession number PR00421C, p-value=8.615e-12, raw score of 13.60
  DOMAIN (45)..(87): Thioredoxin domain identified by PFam, accession name thiored, E-value=1e-15, PFam score of 56.5
MLKNVLMRKCGVHDREKFLVLDYFCQSSVLAVLYLILSLCYFPYQDVASECEVKCMPTFQFFKKGQKVGEFSGANKEKLEATINELV

SEQ ID NO: 12342 - protein, 34 aa, Homo sapiens
  misc_feature (1)...(34): Xaa = X or * as defined in Table 2
VCREREPHQKVFNKMPKXSYRTVPVTPEGIVLSL

SEQ ID NO: 12343 - protein, 33 aa, Homo sapiens
QMFQFPPPKNPITTKTHTQITSQLHICISLTKQ

SEQ ID NO: 12344 - protein, 1089 aa, Homo sapiens
  DOMAIN (781)..(812): Protein kinases ATP-binding region proteins domain identified by eMATRIX, accession number BL00107A, p-value=3.400e-23, raw score of 18.39
  DOMAIN (669)..(974): Eukaryotic protein kinase domain identified by PFam, accession name pkinase, E-value=4.2e-67, PFam score of 236.3
  misc_feature (1)...(1089): Xaa = X or * as defined in Table 2
MRPKTFPATTYSGNSRQRLQEIREGLKQPSKSSVQGLPAGPNSDTSLDAKVLGSKDATRQQQQMRATPKFGPYQKALREIRYSLLPFANESGTSAAAEVNRQMLQELVNAGCDQEMAGRALKQTGSRSIEAALEYISKMGYLDPRNEQIVRVIKQTSPGKGLMPTPVTRRPSFEGTGDSFASYHQLSGTPYEGPSFGADGPTALEEMPPAVRGLPFPRSRPPRARPPAPAPTQGLRCQRRGSRGTLPAAGRALRAAAPAGAWGTPGLRSAAQPLLPEQDAAGDRGLRQPAPKGQGGPPGAGLAFPPPAAGLYVPHPHHKQAGPAAHQLHVLGSRSQVFASDSPPQSLLTPSRNSLNVDLYELGSTSVQQWPAATLARRDSLQKPGLEAPPRAHVAFRPDCPVPSRTNSFNSHQPRPGPPGKAEPSLPAPNTVTAVTAAHILHPVKSVRVLRPEPQTAVGPSHPAWVPAPAPAPAPAPAPAAEGLDAKEEHALALGGAGAFPLDVEYGGPDRRCPPPPYPKHLLLRSKSEQYDLDSLCAGMEQSLRAGPNEPEGGDKSRKSAKGDKGGKDKKQIQTSPVPVRKNSRDEEKRESRIKSYSPYAFKFFMEQHVENVIKTYQQKVNRRLQLEQEMAKAGLCEAEQEQMRKILYQKESNYNRLKRAKMDKSMFVKIKTLGIGAFGEVCLACKVDTHALYAMKTLRKKDVLNRNQVAHVKAERDILAEADNEWVVKLYYSFQDKDSLYFVMDYIPGGDMMSLLIRMEVFPEHLARFYIAELTLAIESVHKMGFIHRDIKPDNILIDLDGHIKLTDFGLCTGFRWTHNSKYYQKGSHVRQDSMEPSDLWDDVSNCRCGDRLKTLEQRARKQHQRCLAHSLVGTPNYIAPEVLLRKGYTQLCDWWSVGVILFEMLVGQPPFLAPTPTETQLKVINWENTLHIPAQVKLSPEARDLITKLCCSADHRLGRNGADDLKAHPFFSAIDFSSDIRKQPAPYVPTISHPMDTSNFDPVDEESPWNDCQREVSTKAWDTLTSPNNKHPEHAFYEFTFRRFFDDNGYPFRCPKPXEQKLHKAESSDLESSDLVDQTEGCQPVYV

SEQ ID NO: 12345 - protein, 90 aa, Homo sapiens
  misc_feature (1)...(90): Xaa = X or * as defined in Table 2
LERLIFVGGLGQFFPPPKLRFFPKIPQLVFFSPPFRKKIFPCPPRLSLGPPRVLLKGPPSSSSSSSSSKKCXPLMFYCHRRWPTGVYVLP

SEQ ID NO: 12346 - protein, 123 aa, Homo sapiens
  misc_feature (1)...(123): Xaa = X or * as defined in Table 2
QGPDHFSLFWHLLQAPGLSPCLKWATALETPPSPNGLPIVPVFPGSSRMAGMIESHIISEIGFLPNKEKKKGGCPPLFPRNFGFKFAPSGLKVGYLKVFEPKLNYSDHDVIKWVRXIGRSGIY

SEQ ID NO: 12347 - protein, 92 aa, Homo sapiens
  misc_feature (1)...(92): Xaa = X or * as defined in Table 2
PPRQAKMQNLAAPGSHSQSPWTLRPKALXLTPSQIFSAXRLKTDTARSPRKPPSFQGPVSLASITVVGIDGQASKPLKTPQLWCQLRQYSFK

SEQ ID NO: 12348 - protein, 173 aa, Homo sapiens
  DOMAIN (23)..(113): Retroviral aspartyl protease domain identified by PFam, accession name rvp, E-value=4.6e-09, PFam score of 37.2
  misc_feature (1)...(173): Xaa = X or * as defined in Table 2
AAEDXHCPIASETYKTITELWVTLPVEGKSVPFLINTEATHSTLPSFQGPVSLASITVVGIDSQAYKPLKSSQLWCQLGQYSFMHSFLVIPTCPVPLLGQDILTKLSASLTIPGLQPHLIATLFPSLKPPSHPPLVSPHLNPHIWDMSTPSLVTDHAPLTIPLKPNHPYPVQC

SEQ ID NO: 12349 - protein, 142 aa, Homo sapiens
  DOMAIN (1)..(142): MOZ/SAS family domain identified by PFam, accession name MOZ_SAS, E-value=1.2e-94, PFam score of 327.9
PGNEIYRKGTISFFEIDGRKNKSYSQNLCLLAKCFLDHKTLYYDTDPFLFYVMTEYDCKGFHIVGYFSKEKESTEDYNVACILTLPPYQRRGYGKLLIEFSYELSKVEGKTGTPEKPLSDLGLLSYRSYWSQTINEISEITS

SEQ ID NO: 12350 - protein, 56 aa, Homo sapiens
  misc_feature (1)...(56): Xaa = X or * as defined in Table 2
LGGCEDSRRKGAPRCFLSRGDHSWEPRDXPPPWLFPSNSCXXLAAGRPSPVRSSPS

SEQ ID NO: 12351 - protein, 461 aa, Homo sapiens
  DOMAIN (232)..(425): MOZ/SAS family domain identified by PFam, accession name MOZ_SAS, E-value=1.3e-150, PFam score of 513.8
MAEVGEIIEGCRLPVLRRNQDNEDEWPLAETLSVKDISGRKLFYVHYIDFNKRLDEWVTHERLDLKKIQFPKKEAKTPTKNGLPGSRPGSPEREVKRKVEVVSPATPVPSETAPASVFPQNGAARRAVAAQPGRKRKSNCLGTDEDSQDSSDGIPSAPRMTGSLVSDRSHDDIVTRMKNIECIELGRHRLKPWYFSPYPQELTTLPVLYLCEFCLKYGRSLKCLQRHLTKCDLRHPPGNEIYRKGTISFFEIDGRKNKSYSQNLCLLAKCFLDHKTLYYDTDPFLFYVMTEYDCKGFHIVGYFSKEKESTEDYNVACILTLPPYQRRGYGKLLIEFSYELSKVEGKTGTPEKPLSDLGLLSYRSYWSQTILEILMGLKSESGERPQITINEISEITSIKKEDVISTLQYLNLINYYKGQYILTLSEDIVDGHERAMLKRLLRIDSKCLHFTPKDWSKRGKW

SEQ ID NO: 12352 - protein, 537 aa, Homo sapiens
  DOMAIN (284)..(481): MOZ/SAS family domain identified by PFam, accession name MOZ_SAS, E-value=1.9e-136, PFam score of 466.7
MAEVGEIIEGCRLPVLRRNQDNEDEWPLAEILSVKDISGRKLFYVHYIDFNKRLDEWVTHERLDLKKIQFPKKEAKTPTKNGLPGSRPGSPEREVPASAQASGKTLPIPVQITLRFNLPKEREAIPGGEPDQPLSSSSCLQPNHRSTKRKVEVVSPATPVPSETAPASVFPQNGAARRAVAAQPGRKRKSNCLGTDEDSQDSSDGIPSAPRMTGSLVSDRSHDDIVTRMKNIECIELGRHRLKPWYFSPYPQELTTLPVLYLCEFCLKYGRSLKCLQRHLTKCDLRHPPGNEIYRKGTISFFEIDGRKNKSYSQNLCLLAKCFLDHKTLYYDTDPFLFYVMTEYDCKGFHIVGYFSKEKESTEDYNVACILTLPPYQRRGYRKLLIEFSEYELSKVEGKTGTPEKPLSDLGLLSYRSYWSQTILEILMGLKSKSGERPQITSNDISEITSIKKEDVISTLQYLNLINYYKGQYILTLSEDIVDGNERPMLKRLLRIDSKCLHFHSQRTWSQEVDSGDQDTCPHCKCQRPASQDLGAD

SEQ ID NO: 12353 - protein, 57 aa, Homo sapiens
  DOMAIN (22)..(57): Matrix protein (MA) p15. domain identified by eMATRIX, accession number PF01140D, p-value=1.419e-09, raw score of 15.54
LWSPPNSNILDTTTAGETPEQDLNREREREKERERERERERERERERERERERERES

SEQ ID NO: 12354 - protein, 216 aa, Homo sapiens
  DOMAIN (3)..(149): MOZ/SAS family domain identified by PFam, accession name MOZ_SAS, E-value=1.1e-08, PFam score of -23.1
  misc_feature (1)...(216): Xaa = X or * as defined in Table 2
MLLMFICDLLLTLSCSIALGYELSKVEGKTGTPEKPLSDLGLLSYRSYWSQTILEILMGLKSESGERPQITIKXAWRCLPGGTWHGLSVPGLSLSGLLGTDKGPQGTXPVLSHSEISEITSIKKEDVISTLQYLNLINYYKGREAGRGDRCVGCRVQSSVGXPPAEPISSAQGQYILTLSEDIVDGHERAMLKRLLRIDSKCLHFTPKDWSKRGKW

SEQ ID NO: 12355 - protein, 144 aa, Homo sapiens
  misc_feature (1)...(144): Xaa = X or * as defined in Table 2
LRDGVLLCHPGWSTVAQSXLTAALNFWVRGSSCLSLLXLVLRNSPLHPANLFFYFCRDKHLTILTRLVLNFWAQVILRPWLPKGLGITGMSHCTQPNFKNQRKGYCQVNFNNQTKTLSLAGNTYFTPILFFGNKHVTSYNFPSM

SEQ ID NO: 12356 - protein, 127 aa, Homo sapiens
  misc_feature (1)...(127): Xaa = X or * as defined in Table 2
VVAAEVPSFFFFFLRTESCFVTQAGLQWHDLGSATSISPGSSDSPASASQVAGITGRHHYALAXFFVFLVDMGIHHVGSGWSRNSLNLVNLPCLGPPQYWGLQGMSPPMPRPLKCPSLKGKMPNSHP

SEQ ID NO: 12357 - protein, 106 aa, Homo sapiens
  misc_feature (1)...(106): Xaa = X or * as defined in Table 2
LYFFSFETESCSVTQAGVQWWCDLGSLATPPPGSSNSCASASXVARITGVHHHAQLMFVFLVETGFHHFGQSGLKPLSDPPASASQSAGINRCEPPGTGHHYIFSK

SEQ ID NO: 12358 - protein, 844 aa, Homo sapiens
  DOMAIN (499)..(530): Protein kinases ATP-binding region proteins domain identified by eMATRIX, accession number BL00107A, p-value=1.931e-11, raw score of 18.39
  DOMAIN (401)..(645): Eukaryotic protein kinase domain identified by PFam, accession name pkinase, E-value=2.4e-39, PFam score of 144.2
  misc_feature (1)...(844): Xaa = X or * as defined in Table 2
MQPLDFSSGGSDPNISLSEKIRDQLVVGQLIPDCYVELEKIILSERKNVPIEFPVIDRKRLLQLVRENQLQLDENELPHAVHFLNESGVLLHFQDPALQLSDLYFVEPKWLCKIMAQDVSSIFGLYIRDILTVKVEGCPKHPKGIISRRDVEKFLSKKRKFPKNYMSQYFKLLEKFQIALPIGEEYLLVPSSLSDHRPVIELPHCENSEIIIRLYEMPYFPMGFWSRLINRLLEISPYMLSGRGCILLGQVVDHIDSLMEEWFPGLLEIDICGEGETLLKKWALYSFNDGEEHQKILLDDLMKKAEEGDLLVNPDQPRLTIPISQIAPDLILADPPRNIMLNNDELEFEQAPEFLLDCFVCIHLYPSSDYISRHYMRTINIVQTGFAKCRWRVTVHGADHGDGSFGSVYRAAYEGEEVAVKIFNKHTSLRLLRQELVVLCHLHHPSLISLLAAGIRPRMLVMELASKGSLDRLLQQDKASLTRTLQHRIALHVADGLRYLHSAMIIYRDLKPHNVLLFTLYPNAAIIAKIADYGIAQSLLXNGDXKTIQRGTPGFRAPEVARGNVIYNQQADVYSFGLLLYDILTTGGRIVEGLKFPNEFDELEIQGKLPDPVKEYGCAPWPMVEKLIKQCLKENPQERPTSAQVFDILNSAELVCLTRRILLPKNVIVECMVATHHNSRNASIWLGCGHTDRGQLSFLDLNTEGYTSEEVADSRILCLALVHLPVEKESWIVSGTQSGTLLVINTEDGKKRHTLEKMTDSVTCLYCNSFSKQSKQKNFLLVGTADGKLAIFEDKTVKLKGAAPLKILNIGNVSTPLMCLSESTNSTERNVMWGRMWHKDFLLF

SEQ ID NO: 12359 - protein, 74 aa, Homo sapiens
  misc_feature (1)...(74): Xaa = X or * as defined in Table 2
LGVAFQCFFCFWFVELFGFVGLQLLSNLEKFQPLCLQIFFLSPCPIRSLYICXSSKVVSQLTVTLLVFPVFFSL

SEQ ID NO: 12360 - protein, 460 aa, Homo sapiens
  DOMAIN (411)..(454): Acyl-CoA dehydrogenases proteins domain identified by eMATRIX, accession number BL00072E, p-value=7.600e-33, raw score of 24.12
  DOMAIN (78)..(460): Acyl-CoA dehydrogenase domain identified by PFam, accession name Acyl-CoA_dh, E-value=5e-190, PFam score of 644.7
LAAAAHPLAGLVGGEAWIGGAKSWLSFSAGSSCMAEMATATRLLGWRVASWRLRPPLAGFVSQRAHSLLPVDDAINGLSEEQRQLRQTMAKFLQEHLAPKAQEIDRSNEFKNLREFWKQLGNLGVLGITAPVQYGGSGLGYLEHVLVMEEISRASGAVGLSYGAHSNLCINQLVRNGNEAQKEKYLPKLISGEYIGALAMSEPNAGFWMVSMKLKAEKKGNHYILNGNKFWITNGPDADVLIVYAKTDLAAVPASRGITAFIVEKGMPGFSTSKKLDKLGMRGSNTCELIFEDCKIPAANILGHENKGVYVLMSGLDLERLVLAGGLLGLMQAVLDHTIPYLHVREAFGQKIGHFQLMQGKMADMYTRLHGLFGQYVYNVAKACDEGHIIPKDCAGVILYAAECATQVALDGIQCFGGNGYINDFPMGRFLRDAKLYEIGAGTSEVRRLVIGRAFNADFH

SEQ ID NO: 12361 - protein, 286 aa, Homo sapiens
  DOMAIN (208)..(221): Acyl-CoA dehydrogenases proteins domain identified by eMATRIX, accession number BL00072B, p-value=8.500e-15, raw score of 9.48
  DOMAIN (44)..(286): Acyl-CoA dehydrogenase domain identified by PFam, accession name Acyl-CoA_dh, E-value=3.5e-65, PFam score of 225.0
  misc_feature (1)...(286): Xaa = X or * as defined in Table 2
MATATRLLGWRVASWRLRPPLAGFVSQRAHSLLPVDDAIKGVLRESQRQLRQTMAKFLQENLAPKAREIDRSNEFKNLREFWKQLGEPWAVFGASQPLVQYGGFRPGAYLGSMLLGXWEEISPSFSGAVGLSYGAHSNLSHQPSLLRNWEFRAQKEKYLPEGXFSGEYIGALAMSKPHAGSDVVSMKLKAEKKGEATLNLGAKMGRGNHYILNGNKFWITNGPDADVLIVYAKTDLAAVPASRGITAFIVEKGMPGFSTSKKLDKLGMRGSNTCELIFEDCKIPGK

SEQ ID NO: 12362 - protein, 244 aa, Homo sapiens
  DOMAIN (172)..(187): LIM domain proteins domain identified by eMATRIX, accession number BL00478B, p-value=2.731e-10, raw score of 14.79
  misc_feature (1)...(244): Xaa = X or * as defined in Table 2
SHHHPLAAPSLGEAAISRSFQSLACSPGLPAADRLSYSGRPGSRQAGLGRAGDSAVLVLPPSPGPRSSRPSMDSEGGSLLLDEDSEVFKMLQENREGRAAPRQSSSFRLLQEALEAEERGGTPAFLASSLSPQSFLARLQGGLATPPKLHTCEKCSTSIANQAVRIQEGRYRHPGCYTCADCGLNLKRRGHFWVGDELYCEKHARQRYSAPATLSSRAXAPFGSCRKPWKLRREVARQPSWPAH

SEQ ID NO: 12363 - protein, 128 aa, Homo sapiens
  misc_feature (1)...(128): Xaa = X or * as defined in Table 2
FVHFQSKKTMRKICLFFFFSSETGSRSVSQAGVQWARVIAHCNLKLLDSSDLPALALASXVARTVGMYHRGLACVYFIIQINLILYFLAQMNLKKHQTFLFYEMLNLIASQAGKIYSSNRNIKVFWPQ

SEQ ID NO: 12364 - protein, 54 aa, Homo sapiens
ERKRPSRKQRERNRKNQNERKSRGDWQRANVGAGQKEEMKCLAVELEIGSQPRS

SEQ ID NO: 12365 - protein, 22 aa, Homo sapiens
MPTLYNHCFLQLFTIISKLISY

SEQ ID NO: 12366 - protein, 39 aa, Homo sapiens
MWNLCIWRVNCTINNTNMPTLYNHCFLQLFTIISKLISY

SEQ ID NO: 12367 - protein, 88 aa, Homo sapiens
  misc_feature (1)...(88): Xaa = X or * as defined in Table 2
FFFLKRDRVSFCHPGLSAVAQLXLTVALNSXVKGSSYLSFQSSWHYRYVLPYLANFKNFFFKRRELTLFLRLILTSWAQVSFLLQPPK

SEQ ID NO: 12368 - protein, 138 aa, Homo sapiens
  misc_feature (1)...(138): Xaa = X or * as defined in Table 2
LFAGPSAMFYLAAAVSDFYVPVSEMPEHKIQSSGGPLQITMKMVPKLLSPLVKDWAPKAFIISFKLETDPAIVINRARKALEIYQHQVVVANILESRQSFVFIVTKDSETKLVSTHSFYRXQKLKXKALIGSKIVQGS

SEQ ID NO: 12369 - protein, 234 aa, Homo sapiens
PVRFLDNFSSGRRGATSAEAFLAAGYGVLFLYRARSAFPYAHRFPPQTWLSALRPSGPALSGLLSLEAEENALPGFAEALRSYQEAAAAGTFLAVEFTTLADYLHLLQAAAQALNPLGPSAMFYLAAAVSDFYVPVSEMPEHKIQSSGGPLQITMKMVPKLLSPLVKDWAPKAFIISFKLETDPAIVINRARKALEIYQHQVVVANILESRQSFVFIVTKDSETKLLLSEEKKK

SEQ ID NO: 12370 - protein, 144 aa, Homo sapiens
  misc_feature (1)...(144): Xaa = X or * as defined in Table 2
GPCAMFYLAAAVSDFYVPVSEMPEHKIQSSGGPLQITMKMVPKLLSPLVKDWAPKAFIISFKLETXPRLIVINRARKALEIYQHQVVVANILGVKDSPLCLLXPKDSEPKLLLSEEEIEKGVEIEEKIVDNLQSRHTAFIGDRN

SEQ ID NO: 12371 - protein, 135 aa, Homo sapiens
  DOMAIN (24)..(70): F-actin capping protein beta subunit proteins domain identified by eMATRIX, accession number BL00231A, p-value=1.000e- 40, raw score of 8.59
  DOMAIN (20)..(135): F-actin capping protein, beta subunit domain identified by PFam, accession name F_actin_cap_B, E-value=9.2e-22, PFam score of 85.7
LVVISPCGGIPGTAAAAATMSDQQLDCALDLMRRLPPQQIEKNLSDLIDLVPSLCEDLLSSVDQPLKIARDKVVGKDYLLCDYNRDGDSYRSPWSNKYDPPLEDGAMPSARLRKLEVEANNAFDQYRDLWRRMKL

SEQ ID NO: 12372 - protein, 113 aa, Homo sapiens
  DOMAIN (4)..(50): F-actin capping protein beta subunit proteins domain identified by eMATRIX, accession number BL00231A, p-value=1.000e- 40, raw score of 8.59
  DOMAIN (1)..(112): F-actin capping protein, beta subunit domain identified by PFam, accession name F_actin_cap_B, E-value=1.4e-10, PFam score of 29.7
SDRQLDCALDLMRRLPPQQIGKNLSNLIDLVPSLCEDLLSSVDQPLKIARDKVVAKDYLLCDYNRDGDSYRSPWSNKYDPPLEDGAMPSARLRKLQVEACFCHTSLSVLSTFP

SEQ ID NO: 12373 - protein, 52 aa, Homo sapiens
ENKIRSTLNEIYFGKTKDIVNGLRSVQTFADKSKQEALKNDLVEALKRKQQC

SEQ ID NO: 12374 - protein, 126 aa, Homo sapiens
  DOMAIN (5)..(51): F-actin capping protein beta subunit proteins domain identified by eMATRIX, accession number BL00231A, p-value=1.000e- 40, raw score of 8.59
  DOMAIN (1)..(122): F-actin capping protein, beta subunit domain identified by PFam, accession name F_actin_cap_B, E-value=1e-08, PFam score of - 4.6
MSDQQLDCALDLMRRLPPQQIEKNLSDLIDLVPSLCEDLLSSVDQPLKIARDKVVGKDYLLCDYNRDGDSYRSPMEVTKYDPSLGRMGGNAVKLRAEKSLEVGKANKWPFDQYPKTLLLLELLDPG

SEQ ID NO: 12375 - protein, 164 aa, Homo sapiens
  DOMAIN (60)..(115): kw TRANSCRIPTASE REVERSE II ORF2 domain identified by eMATRIX, accession number DM01354Q, p-value=1.000e-40, raw score of 9.23
  DOMAIN (15)..(162): Reverse transcriptase domain identified by PFam, accession name rvt, E-value=2e-06, PFam score of 21.7
EELVPIFLTLFHKIEKEGTLPNSFYEASITLIPKPGKDITKKENYRWISLMNIDAKILNKILANQIQQITKKIIHHDQVGFIPGMQGWFNMHKSINVIHHVNRIKNKNHMIISIDAEKAFDKIQHPFMIKTLSKMGIQGTYLSVIKAIYDKPTANIKQTFQIQD

SEQ ID NO: 12376 - protein, 309 aa, Homo sapiens
  DOMAIN (124)..(152): F-ACTIN CAPPING PROTEIN BETA SUBUNIT SIGNATURE domain identified by eMATRIX, accession number PR00192D, p-value=1.000e- 28, raw score of 8.23
  DOMAIN (29)..(309): F-actin capping protein, beta subunit domain identified by PFam, accession name F_actin_cap_B, E-value=1.6e-142, PFam score of 486.9
  misc_feature (1)...(309): Xaa = X or * as defined in Table 2
PRVRXAPGPAAGGRATDAGTGTAAAATTMSDQHLDCALDLKRRLRPQQIEKNLSDLIDLVPSLCEDLLSSVDQPLKIARDKVVGQDYLLCDYNIDGDSYRSPWSNKDDPPLEDGAMPSARLRKLEVEANNAFDQYRDLYFXKVGVSSVYLWDLDHGFGLSVILHKRKGWEDGIKRRSKGCWDSIHVVEVQEKSSGRTPHYKLTSTVMLWLQTNKSGSCTMNLGGSLTRQMEKDETVSDCSPQISATIGRLVEDMENKIRSTLNEIYFGKNKGYRSMGLRSVQTFADNSKQEALEELTLVGGFERESKQC

SEQ ID NO: 12377 - protein, 637 aa, Homo sapiens
  DOMAIN (581)..(594): GLUTAMYL-TRNA SYNTHETASE SIGNATURE domain identified by eMATRIX, accession number PR00987A, p-value=6.806e-09, raw score of 12.14
MTLEDPPGFCERLLSRVAALFPALRSGGFQAHYRAHSSSLCPAENPWVLTCCLLNNLDEDGDLVAFSSDEELTMAMSYVKDDIFRIYINDSPAVENISSFCFVSLKSAGRADALKERQSGSTHAHVQLRLQGSRGNSGHSQRPSNYKVLAGSQRDFNGTDITAAAAAPSGLYLDNVVNKQSVSPPIPHLRALLSSSDDPPAEVDIFELLKVSYEKFSSLRAEDIEQMRFKQRLKVIQSLEDTAKRSVDRFSELQLSRQTQHEHFKELDNFYKISSHEQSYGSQPPILQPALGAAQHCASHSVTCQSTSFLQLKKGKTKLYAEKQLNSTWSRQTSGANLRVLHEAREAQSSGPAPSISRMDARQALVLLPSSRESSQKRTRTCSPRGDEDPGKFKEAELKMRKQFGMPEGEKLVNYYSCSYWKGRVPRQGWLYLTVNHLCFYSFLLGKEEKKRHLSICKIIPVCAKWGVQFSSEMLHQHRWVLRQCDPKHLGSLPDKSQAPPTLTHQDQKRPGLSLLGPGCCAGTLPLQQLTGLPGCRFFFRSGNIEHPEDKLFNTSVEVLPFDNPQSDKEALQEGRTATLRYPRSPDGYLQIGSFYKGVAEGEVDPAFGPLEALRLSIQTDSPVWVILSEIFLKKAD

SEQ ID NO: 12378 - protein, 265 aa, Homo sapiens
  misc_feature (1)...(265): Xaa = X or * as defined in Table 2
ESVAAALSPLGIEVDIDVEHGGKRSRLTPVSPEVSATGEKSSSQPSSCCSDPSKPGGNVEGATQSLAEQMRKIALESEGRPEASLCPFPPPGTTGQPSDLWPAPPPHSQHLCSPTYKPEGAGCWLAVDVCCHLKSRWEPARTLXLLGLCEWPLFPLDPCSLNCTCACVLPDCLPGARAMVRLGLLRVSPVCSWXVLFQEQMESDNCSGGDDDWTHLSSKEVDPSTGELQSLQMPESEGPSSLDPSQEGPTGLKEAALYPHLPPGK

SEQ ID NO: 12379 - protein, 498 aa, Homo sapiens
  DOMAIN (156)..(173): Zinc finger present in dystrophin CBP/p300. domain identified by eMATRIX, accession number PF00569, p-value=3.182e-16, raw score of 13.42
  DOMAIN (139)..(183): Zinc finger present in dystrophin, CBP/p300 domain identified by PFam, accession name ZZ, E-value=6.7e-10, PFam score of 46.3
  misc_feature (1)...(498): Xaa = X or * as defined in Table 2
RGGCDRDGPFSASSPLAMASLTVKAYLLGKEDAAREIRRFSFCCSPEPEAEAEAAAGPGPCERLLSRVAALFPALRPGGFQAHYRDEDGDLVAFSSDEELTMAMSYVKDDIFRIYIKEKKECRRDHRPPCAQEAPRNMVHPNVICDGCNGPVVGTRYKCSVCPDYDLCSVCEGKGLHRGHTKLAFPSPFGHLSEGFSHSRWLRKVKHGHFGWPGWEMGPPGNWSPRPPRAGEARPGPTAESASGPSEDPSVNFLKNVGESVAAALSPLGIEVDIDVEHGGKRSRLTPVSPESSSTEEKSSSQPSSCCSDPSKPGGNVEGATQSLAEQMRKIALESEGRPEEQMESDNCSQGGDDDWTHLSSKEVDPSTGELQSLQMPESEGPKLSGTPPREGPTGLERKLPLYPHLPPEVDPRLDLSPFSQIACSMGLSSXLKGGLGSTRVPGRPKNYXHSERLWDTIQYSKHPPAVVDHFLPTFFLRAPLLVFIVVFKLCVELAGLL

SEQ ID NO: 12380 - protein, 156 aa, Homo sapiens
  misc_feature (1)...(156): Xaa = X or * as defined in Table 2
HWQVLPRVKKRLSPLKTHNCALPSTKLSAVRDYLFYSENLNFPQLNKDSXRGCXQALKSPTAVVFVLSLSHSFSFAVSEGCFFHRERQVASTSMEQLLSLLAGIPFVEDSCPLQKELSKTLPLTLEVLGVSMFFKFSWLPVIWVFGFISQLSGLES

SEQ ID NO: 12381 - protein, 1516 aa, Homo sapiens
  misc_feature (1)...(1516): Xaa = X or * as defined in Table 2
MRNPVHSHIGATVSHQTDFGANVPNMPALQSQLITSDTYSMQMQMIPSNSTRLPVAYQGNQGLNQSFSEQQVDWTQQCISKGLTYPDYRPPPKLYRYSPQSFLPDSTIQKQNFIPHTSLQVKNSQLLNSVLTLPSRQTSAVPSQQYATQTDKRPPPPPYNCRYGSQPLQSTQHITKHLSMEVPQSREMLSSEIRTSFQQQWQNPNENVSTIGNFTNLKVNTNSKQPFNSPIRSSVDGVQTLAQTNEEKIMDSCNPTSNQVLDTSVAKEKLVRDIKTLVEIKQKFSELARKIKINKDLLMAAGCIKMTNTSYSEPAQNSKLSLKQTAKIQSGPQITPVMPENAERQTPTVVESAETNKTQCMLNSDIQEVNCRRFNQVDSVLPNPVYSEKRPMPDSSHDVKVLTSKTSAVEMTQAVLNTQLSSENVTKVEQNSPAVCETISVPKSMSTEEYKSKIQNENMLLLALLSQARKTQKTVLKDANQTIQDSITRQLXNESKYPNDWXPTEFEETWNSKYFXSILQILQKKRSVINSEQTQQQLEFQSLLTSTLRVLVQLSGNSNSQNKISNPSQQTALSMVNAQLXVFRYKYNKGNRTSDSCSVTVSSVRGQNIVCQRNNTCSVTXNSVSRYXRGQCLWFYKINWQKMQRQLLLXKLLLVDQXQVQQHQPRFFHXLRRKSRMSQLMVIQKSHLMSIKESITNXSQLIHSPMNDQQISQESRNSTVVSSDTLQIDNICSLVEGDTSYNSQIAKIFSSLPLKMVEPQKPSLPNQQGIGCREPEKQLDNTTENKDFGFQKDKPVQCTDVSHKICDQSKSEPPLESSFNNLETQQSYSREKXFGACHLKKAQLTIRARQLAIQEDIYPQEIDASSNYTPQDPARNEIHSDKAPVLYLHDQLSELLKEFPYGIEAVNTREGSVGQQTTYQTSEDQTADKTSSDSKDPADQIQITILSSEQMKEIFPEQDDQPYVVDKLAEPQKEEPITEVVSQCDLQAPAAGQSRDSVILDSEKDDIPLLCIGLALHGLRRSTPVSVXFHQELILEEEKQKEQCSPLDTNSCKQGERTSDRDVTVVQFKSLVNNPKTPPDGKSHFPELQDDSRKDTPKTKHKSLPRTEQELVAGQFSSKCDKLNPLQNHKRKKLRFHEGNLSLQXXNDSILXTSFSEKPDRRNMXHRTHVHXKQKQLFLPNKDVYKKHSSLGQSLSPEKIKLKLKSVSFKQKRKLDQGNRIRXEVKKKKHDKQEQKGSVGATFKLSDSLSNPNERAIVKEKMVSNTKSVDTKASSSKFSRILTPKEYLQRQKHKEALSNKASKKICVKNVPCDSEHMRPSKLAVQVESCGKSNEKHSSGVQTSKESLNGLTSHGKNLKIHHSQESETYNILRNVKEKVGGKQPDKIWIDKTKLDKLTNISNEAQFSQMPPQVKDQKKLYLNRVGFKCTERESISLTKLESSPRKLHKDKRQENKHKTFLPVKGNTEKSNMLEFKLCPDILLKNTNSVENGRMXSLILGRSKPLCKFQEXKVQKKTG

SEQ ID NO: 12382 - protein, 68 aa, Homo sapiens
MLPRAGLLLCGKLVPNNFSQPSRQILLCLGCDSPHLTVGHEGWKTTLPGAGATPYRIGPFSLLQRGVS

SEQ ID NO: 12383 - protein, 48 aa, Homo sapiens
MSKVLNQSTYITVQCGYVSINSFYVSFYYSIKLAKRHLGTFFRTVLVI

SEQ ID NO: 12384 - protein, 63 aa, Homo sapiens
  misc_feature (1)...(63): Xaa = X or * as defined in Table 2
NGSTGCIGIQANQYFNYRSLSSFESGKFVKCTEQLELVPGENIHXLLEGSKKKLTLKNLFRNM

SEQ ID NO: 12385 - protein, 102 aa, Homo sapiens
  misc_feature (1)...(102): Xaa = X or * as defined in Table 2
KVQSFFIFYLFIYFXDGVXLFRPGWSAVVLSRLTATSAFRFKQFSCLSLPSSWDYRCPPLHLANFCIFXXRRGFTMLARLVSISXPQVIRPPWPPKVLGLQM

SEQ ID NO: 12386 - protein, 62 aa, Homo sapiens
  misc_feature (1)...(62): Xaa = X or * as defined in Table 2
INFKKKNRLFNKWYWTCVATLEKNKMNSFLMIYPKSNSKXFKNPNVRGKKLXNLFILLYFKF

SEQ ID NO: 12387 - protein, 100 aa, Homo sapiens
  misc_feature (1)...(100): Xaa = X or * as defined in Table 2
SDELRTPGRESLPAENISLXDRVNHQPAIESCTAXNYLYSINAKTKGEMLEAEGMRVVTNSVYHWRLCEKQQTVLMKAGCWRTDKLCLPPEGMLWAVMSR

SEQ ID NO: 12388 - protein, 64 aa, Homo sapiens
  misc_feature (1)...(64): Xaa = X or * as defined in Table 2
IPWIPPVSRSMVTHTWRAPTRFVHLPFFQTDPFVFVFISAFVLLRLVQKQPXQVVPDQGPERGR

SEQ ID NO: 12389 - protein, 78 aa, Homo sapiens
IPWIPPVCPFHGHTHLEVHPHGLSISLYSPPADSPVQGFVVRLISFTFSALADLPRSGPWSDTTCHGCFTVAASSESL

SEQ ID NO: 12390 - protein, 81 aa, Homo sapiens
  DOMAIN (1)..(12): GENE 66 (IR5) PROTEIN SIGNATURE domain identified by eMATRIX, accession number PR00957H, p-value=8.579e-09, raw score of 9.39
FRNLPLPIPSQGTDLIFSAGRLSRPGVRSSSDQFHFLCSGRPSSFRSLVGHHLSRMLHCGSLLREPSRPIVRAPVSDEISI

SEQ ID NO: 12391 - protein, 83 aa, Homo sapiens
  misc_feature (1)...(83): Xaa = X or * as defined in Table 2
IFTAVAFIISESWKQPQCLXTNEXIKLWYIHTMQYYSAIKRNEKLIHATTWMNSENVQWXKARHKKPHIVXLHLYEGSQKRQI

SEQ ID NO: 12392 - protein, 275 aa, Homo sapiens
  misc_feature (1)...(275): Xaa = X or * as defined in Table 2
RTVTTFLSKDSHGVYCAQGGKIPDHQNPQCNRKQHPVSTILMLDKASFCQLRKRKHNLSVNCINRNPFMSLKNTSWHSSLSVTQRHQQQSKLHFQGSILLHXPSQNILSNIXKCINYCXHCSSVLLSYLFIETESYSVAQAGVQWHDLGLLQLLPLRFKQFSCFSLPSSWDYRSAPSCPANFCILVEMGFCHVGQAGLKLLASSDPPALASQSAGITGVSHYTQPCSPFLKSTGLFSCKVLSNPYHKGRIYLGRMCFLNSTWHLVKSTLFCPLFI

SEQ ID NO: 12393 - protein, 171 aa, Homo sapiens
  misc_feature (1)...(171): Xaa = X or * as defined in Table 2
VLIQLVWIALLLVDPSRPVLTKDEPASSSTSSFTSQSQKKGQQSGFLQSRNXGCIALCEVFQREEIYXVGMDXDSFRIKWFFNFIFHLTVITSSDLHIHGEIWVVPNTDHVCTRFFFVYDDCLVVYAYINTLLXGFYXYILLVIVNYTGSVHWFIFYYLVLNVLFCFLLYI

SEQ ID NO: 12394 - protein, 91 aa, Homo sapiens
  misc_feature (1)...(91): Xaa = X or * as defined in Table 2
STPPHSSQRACEPLPSFAQCPRXAPSPPAPHCALICPIPKMEERPPMXIGRXRRHLLSTYCARSCTEQAPCIILLNPHNVLDLSRLWVKGQ

SEQ ID NO: 12395 - protein, 145 aa, Homo sapiens
GYLSEVVEENTPPKMEKEGLEIMIGKKKGIQGHYNSCYLDSTLFCLFAFSSVLDTVLLRPKEKNDVEYYSETQELLRTEIVNPLRIYGYVCATKIMKLRKILEKVEAASGFTSEEKDPAGQKVQDCYFYQIFMEKNEKVGVPTIQ

SEQ ID NO: 12396 - protein, 113 aa, Homo sapiens
  DOMAIN (46)..(89): CAP-Gly domain identified by PFam, accession name CAP_GLY, E- value=0.0046, PFam score of 20.1
EELNTAPVQESPPLAMPPGNSHGLEVGSLAEVKENPPFYGVIRWIGQPPGLNEVLAGLELEDECAGCTDGTFRGTRYFTCALKKALFVKLKSCRPDSRFASLARIWSYLLFSA

SEQ ID NO: 12397 - protein, 473 aa, Homo sapiens
  DOMAIN (64)..(119): kw TRANSCRIPTASE REVERSE II ORF2 domain identified by eMATRIX, accession number DM01354Q, p-value=1.000e-40, raw score of 9.23
  DOMAIN (19)..(276): Reverse transcriptase domain identified by PFam, accession name rvt, E-value=4.4e-44, PFam score of 159.9
MNPNQEEISDLPERIQETEKEGTLPNSFYEASITLIPKLGKDKTKKENYRPISMMNIEANILNKILANQIQQHIKKIIHHDQVGFISQMQGWFNIHRSINVIHHINRIKNKNHMIISIDAEKAFDKIQHHFMIKTLSKIGIQGAYLNVIKAIYDKPTANIILNGKKVEAFPLRTGTRQGYPLSQLFFNIALEVLARAIRQENEIKGIHIGKEKVKLSLFAGDMIFYLENPKDSSKKLLELIKELSKVSRWELNNENTWTQGGEHHTPGPVVGSGEERGIALGDTPNVNDKPLTGAALASTLGVWENENKFTHLFNIHSQFCLPSQGIFFLCGTSTYVCLTTNWTSTCTLIFLSPKIDIAPGNQTLPVPVRAQVHQHRAVQIIPLLIGLGVTNATGTGIAGLSPSLSYYHTLSKDLSDSLQDIAKSTLTLQSQIDSLAAVTLQNHRGLRPPNRRKRWAMHLFRGRLFFHQPVWD

SEQ ID NO: 12398 - protein, 56 aa, Homo sapiens
LPYKEFFLCAIGGQNGFNIPQVTPCPEVGEYLKMSLEDLHSLDSRRIQGCARRLLC

SEQ ID NO: 12399 - protein, 394 aa, Homo sapiens
MPNTNGSIGHSPLSLSAQSVMEELNTAPVQESPPLAMPPGNSHGLEVGSLAEVKENPPFYGVIRWIGQPPGLNEVLAGLELEDECAGWYGWNLQEGTRYFTCALKKALFVKLKSCRPDSSSVLDTVLLRPKEKNDVEYYSETQELLRTEIVNPLRISAGQKVQDCYFYQIFMEKNEKVGVPTIQQLLEWSFINSNLKFAEAPSCLIIQMPRFGKDFKLFKKIFPSLELNITDLLEDTPRQCRICGGLAMYECRECYDDPDISAGKIKQFCKTCNTQVHLHPKRLNHKYNPVSLPKDLPDWDWRHGCIPCQNMELFAVLCIETSHYVAFVKYGKDDSAWLFFDSMADRDESNNEFVQITGVIGKGKETEGRVLTLHLIRAGSSVHVHCRQWMSLW

SEQ ID NO: 12400 - protein, 512 aa, Homo sapiens
  DOMAIN (40)..(83): CAP-Gly domain identified by PFam, accession name CAP_GLY, E- value=0.0046, PFam score of 20.1
  misc_feature (1)...(512): Xaa = X or * as defined in Table 2
PVQESPPLAMPPGNSHGLEVGSLAEVKENPPFYGVIRWIGQPPGLNEVLAGLELEDECAGCTDGTFRGTRYFTCALKKALFVKLKSCRPDSRFASLQPVSNQIERCNSLAIWEAYLSEVVEENTPTQKWEKEGLEIMIGKKKGIQGHYNSCYLDSTLFCLFAFSSVLDTVLLRPKEKNDVEYYSETQELLRTEIVNPLRIYGYVCATKIMKLRKILEKVEAASGFTSEEKDPEEFLNILFHHILRVEPLLKIRSAGQKVQDCYFYQIFMGKKXGKLGVPTISGSCXEWSFINSNLKFAEAPSCLIIQMPRFGKDFKLFKKIFPSLELNITDLLEDTPRQCRICGGLAMYECRECYDDPDISAGKIKQFCKTCNTQVHLHPKRLNHKYNPVSLPKDLPDWEIARHGCIPCQNMELFAVLCIETSHYVAFVKYGKDDSAWLFFDSMADRDGGQNGFNIPQVTPCPEVGEYLEDVSWKTLHSLGLPGESQGCARRLLCDAIYVPCTQSPTMSLYK

SEQ ID NO: 12401 - protein, 75 aa, Homo sapiens
  misc_feature (1)...(75): Xaa = X or * as defined in Table 2
LRKYHATDLISXGSVVGEFDCCFSFLDGSLEDAVDGLLLALQPHKEQYKEFQDLNQEVMNLDDILKVSTFSQKLD

SEQ ID NO: 12402 - protein, 133 aa, Homo sapiens
  misc_feature (1)...(133): Xaa = X or * as defined in Table 2
THENNYNEKKDEIKIFKISLQISAQEEFPFFRRWKSCLCCPRLGVQWHDLGSLQPPTSPGFKRFSGLKLPRAAWIYRYVPITSGXFLYFQXRRGFTHVGQADLDLLTSGDPPVWASQSAGITGVSHHAQPPYC

SEQ ID NO: 12403 - protein, 297 aa, Homo sapiens
VPAGEARVQWHDLGSLQPPPPGSSDSPASSSRVAGITGIKTNTICKKCAQNVQLYGTPKPCQYCNIIAAFIGNKCQRCTNSEKKYGPPYSCEQCKQQCAFDRKDDRKKVDGKLLCWLCTLSYKRVLQKTKEQRKHLSSSSRAGHQEKEQYSRLSGGGHYNSQKTLSTSSIQNEIPKKKSKFESITTNGDSFSPDLALDSPGTDHFVIIAQLKEEVATLKKMLHQKDQMILEKEKKITELKADFQYQESQMRAKMNQMEKTHKEVTEQLQAKNRELLKQAAALSKSKKSEKSGAITSP

SEQ ID NO: 12404 - protein, 268 aa, Homo sapiens
VPAGEARVQWHDLGSLQPPPPGSSDSPASSSRVAGITGIKTNTICKKCAQNVQLYGTPKPCQYCNIIAAFIGNKCQRCTNSEKKYGPPYSCEQCKQQCAFDRKDDRKKVDGKLLCWLCTLSYKRVLQKTKEQRKHLSSSSRAGHQEKEQYSRLSGGGHYNSFSPDLALDSPGTDHFVIIAQLKEEVATLKKMLHQKDQMILEKEKKITELKADFQYQESQMRAKMNQMEKTHKEVTEQLQAKNRELLKQAAALSKSKKSEKSGAITSP

SEQ ID NO: 12405 - protein, 163 aa, Homo sapiens
  misc_feature (1)...(163): Xaa = X or * as defined in Table 2
DGFPSCCQAGVQXHDLGSRQPPPPGSSDSPASASRVAGTTGMHHXSRDVLIRILELEEGLELCPHFSVRKLPKTGQILTLMLSLAPVKLAPQPKLSWMELTRTQQAVPSPFGRWGGIGRRKVLVPIAADGWASGQARGLLGGSGKGEGKATGCEREGTCLLQG

SEQ ID NO: 12406 - protein, 82 aa, Homo sapiens
  misc_feature (1)...(82): Xaa = X or * as defined in Table 2
MFCYLGPHLSHDPILFAKVVRIGKSFMKEFQSDGSKQEDKEKTEVILSCLLSITDQVLLPSLSLMDCNACMSEELWXMFKTF

SEQ ID NO: 12407 - protein, 51 aa, Homo sapiens
  misc_feature (1)...(51): Xaa = X or * as defined in Table 2
QLYINHTPPPLSKSKEREMDKKDLDKSRTLKQKQKPLVNVVHNSWFXDHSN

SEQ ID NO: 12408 - protein, 100 aa, Homo sapiens
  DOMAIN (74)..(100): Ribosomal protein S7 proteins domain identified by eMATRIX, accession number BL00052B, p-value=2.317e-18, raw score of 15.17
  DOMAIN (10)..(100): Ribosomal protein S7p/S5e domain identified by PFam, accession name Ribosomal_S7, E-value=0.0014, PFam score of -32.9
QRRSGCVLRMTEWETAAPAVAETPDIKLFGKWSTDDVQINDISLQAIWLLCTGAREAAFRNIKTIAECLADELINAAKGSSNSYAIKKKDELERVAKSNR

SEQ ID NO: 12409 - protein, 357 aa, Homo sapiens
MKGVMNVALVHSSQEPNGETPSSLYRVAAVLLQFNLIDLDDLYVHLLPADNCIMDEHKREIAEAKQIVRKLTMVVLSSEKMDEREKEKEKEEEKVEKPPDNQKLGLLEALLKIGDWQHAQNIMDQMPPYYAASHKLIALAICKLIHITIEPLYRSVTSWAVDHAGFLESDPCDSTVGHLLSRVGVPKGAKGSPVNALQNKRAPKQAESFEDLRRDVFNMFCYLGPHLSHDPILFAKVVRIGKSFMKEQSKKVGEKDCCVAAKLRAQATRGAQGSPDWVPRFAFSPVRCSGDLGLVGGGWTYVAGEWGVGNKVDGEQYQIPETMGEIGTKTKDLKNGNVKIPTAYPFNWPIWPMENAI

SEQ ID NO: 12410 - protein, 409 aa, Homo sapiens
  misc_feature (1)...(409): Xaa = X or * as defined in Table 2
GRFLCCMLETVTRWHSDRATYEKECGNYPGFLTILRATGFDGGNKADQLDYENFRHVVHKWHYKLTKASVHCLETGEYTHIRNILIVLTKILPWYPKVLNLGQALERRVHKICQEEKEKRPDLYALAMGYKIIFXCDLQDXMTEGFXRLXNVLQCXSLSSAFRRLWEIMRSCFHRLVRVTTSDYQLPVYTGXXFFXSHVXYFLIGRKYNFIIIVNRSSRVKKKKPSXFKDXFIGKLXFLRKLGVLXKPSRTYXKWVFFNSLEPHSRMNNLLILFLKTSCLCFLIWVCIFKHFVRLSSYSGQLKKXEKSIPXYPENEFPSQRPPPPRNAVASVQNGPGGGPSSSSIGSASKSDESSTEETDKSRERSQCGVKAVNKASSTTPKGNSSNGNSGSNSNKAVKENDKEKGKEK

SEQ ID NO: 12411 - protein, 1124 aa, Homo sapiens
  DOMAIN (828)..(879): Neuromodulin (GAP-43) proteins domain identified by eMATRIX, accession number BL00412D, p-value=7.704e-09, raw score of 16.54
  misc_feature (1)...(1124): Xaa = X or * as defined in Table 2
ITDQVLLPSLSLMDCNACMSEELWGMFKTFPYQHRYRLYGQWKNETYNSHPLLVKVKAQTIDRAKYIMKRLTKENVKPSGRQIGKLSHSNPTILFDYVCFEILSQIQKYDNLITPVVDSLKYLTSLNYDVLACILSNCIIEALANPEKERMKHDDTTISSWLQSLASFCGAVFRKYPIDLAGLLQYVANQLKAGKSFDLLILKEVVQKMAGIEITEEMTMEQLEAMTGGEQLKAEGGYFGQIRNTKKSSQRLKDALLDHDLALPLCLLMAQQRNGVIFQEGGEKHLKLVGKLYDQCHDTLVQFGGFLASNLSTEDYIKRVPSIDVLCNEFHTPHDAAFFLSRPMYAHHISSKYDELKKSEKGSKQQHKVHKYITSCEMVMAPVHEAVVSLHVSKVWDDISPQFYATFWSLTMYDLAVPHTSYEREVNKLKVQMKAIDDNQEMPPNKKKKEKERCTALQDKLLEEEKKQMEHVQRVLQRLKLEKDNWLLAKSTKNETITKFLQLCIFPRCIFSAIDAVYCARFVELVHQQKTPNFSTLLCYDRVFSDIIYTVASCTENEASRYGRFLCCMLETVTRWHSDRATYEKECGNYPGFLTILRATGFDGGNKADQLDYENFRHVVHKWHYKLTKASVHCLETGEYTHIRNILIVLTKILPWYPKVLNLGQALERRVHKICQEEKEKRPDLYALAMGYSGQLKSRKSYMIPENEFHHKDPPPRNAVASVQNGPGGGPSSSSIGSASKSDESSTEETDKSRERSQCGVKAVNKASSTTPKGNSSNGNSGSNSNKAVKENDKEKGKEKEKEKKEKTPATTPEARVLGKDGKEKPKEERPNKDEKARETKERTPKSDKEKEKFKKEEKAKDEKFKTTVPNAESKSTQEREREKEPSRERDIAKEMKSKENVXRREEKTPVLGSLESPVSPGSDISQSLERGNQKRRKIDTHPSPSHSSTVKESFIELKESSAKLYINHTPPPTVPRVRREKMDKKDLDKSRERSREREKKDEKDRKEREKGVHSKQRPVKLPPDLTPKRRKEENGTMGVSKHKSESPCESPYPNEKDKEKNKSKSSGKEKGSDSFKSEKMDKISSGGKKESRHDKEKIEKKEKRDSSGGKEEKKHHKSSDKHR

SEQ ID NO: 12412 - protein, 338 aa, Homo sapiens
  misc_feature (1)...(338): Xaa = X or * as defined in Table 2
KHFLYIYAQMNCFSLRLKKKKKKNQLLLQVFSSADEXGSSSSSSSSSGHKRHKKHKRNRSESSRSSRRHSSRASSNQIDQNRERXVLPSSSXYFSIFSFNPXTRSGRKLLGKQDRLQYEKTQIKEKDRCPLSSSSLEIPDDFGGRSEDPRDFYNSYKTQAGSSKTEKPYKSEDIFPARRNSSDSFCRNSEAKIYGYRRFEKDIEGRKEHYRRWEPGSVRHSTSPASSEYSWKSVEKYKKYAHSGSRDFSRHEQRYRLNTNQGEYEREDNYGEDIKTEVPEEDALSSKEHSESSVKNKFTSEFTEYIXSDSXIXKRKRKXGQKINTPKDIGHPLPQNAH

SEQ ID NO: 12413 - protein, 150 aa, Homo sapiens
  DOMAIN (1)..(58): Ribosomal protein L13e domain identified by PFam, accession name Ribosomal_L13e, E-value=0.001, PFam score of 16.5
  misc_feature (1)...(150): Xaa = X or * as defined in Table 2
KLIFFPRKPSAPQEGRQFCXKIGNRPTQLTGPVMPVRNVYKKEKARVITEKEKNFQSPCLVFVMARAKARLFGIRAKKSPRKPQNQDVEKEKIKTLPGNFEISLAVMPGSPTWCVSVGTTWALGWGFTACDFLLPRGFGAFLKRQVQAPG

SEQ ID NO: 12414 - protein, 43 aa, Homo sapiens
MHSKPTGQVSWLGMTTASLPGTNASSMWMPWRLEDHSNLDALP

SEQ ID NO: 12415 - protein, 106 aa, Homo sapiens
  DOMAIN (8)..(23): G-PROTEIN BETA WD-40 REPEAT SIGNATURE domain identified by eMATRIX, accession number PR00320C, p-value=5.680e-10, raw score of 13.01
  DOMAIN (24)..(65): WD domain, G-beta repeat domain identified by PFam, accession name WD40, E-value=0.0083, PFam score of 22.8
FFPNGNAFATGSDDATCRLFDLRADQELMTYSHDNIICGITSVSFSKSGRLLLAGYDDFNCNVWDALKADRAEITSYSCNHCGSVHFSLLLCGTYRKQYSARLYTL

SEQ ID NO: 12416 - protein, 185 aa, Homo sapiens
  DOMAIN (173)..(184): Trp-Asp (WD) repeat proteins proteins domain identified by eMATRIX, accession number BL00678, p-value=2.800e-10, raw score of 9.67
  DOMAIN (18)..(185): WD domain, G-beta repeat domain identified by PFam, accession name WD40, E-value=5.1e-27, PFam score of 103.2
  misc_feature (1)...(185): Xaa = X or * as defined in Table 2
CPLVIRSCSSALWDIETGQQTTTFTGHTGDVMSLSLAPDTRLFVSGACDASAKLWDVYSQCFFLSVYMMSXFAFSFQFFPNGNAFATGSDDATCRLFDLRADQELMTLTPHDNIICGITSVSFSKSGRLLLAGYDDFNCNVWDALKADRAGVLAGHDNRVSCLGVTDDGMAVATGSWDSFLKIWN

SEQ ID NO: 12417 - protein, 155 aa, Homo sapiens
  DOMAIN (52)..(67): G-PROTEIN BETA WD-40 REPEAT SIGNATURE domain identified by eMATRIX, accession number PR00320C, p-value=5.680e-10, raw score of 13.01
AFSAPDTRLFVSGACNASAKLWNVGEGMCGQTFTGHESDINAICFFPNGNAFATGSDDATCRLFDLRADQELMTYPHDNIICGITSVSFSKSGRLPPGMGTTNFNCNVWDALKSRTGQVFLAGHDNPRQPAWGVTDDGMAVATGSWDSFPQDLGN

SEQ ID NO: 12418 - protein, 130 aa, Homo sapiens
  misc_feature (1)...(130): Xaa = X or * as defined in Table 2
SRGFTLLARLVLNSXPQCDPPLPLASQSAGITRLGMSYHAXPIIIFETRSRSVTQDGGVQXCNHGLLQPWHPGLKESSCLSLPGGHAPPHLANFIFCRNRVSLCCSGWSXTSSDPPLPLASQSAGIIGWV

SEQ ID NO: 12419 - protein, 50 aa, Homo sapiens
QRRSCCVLRMTEWETAAPAVAETPDIKLFGKWSTDDVQINDISLQVRGTW

SEQ ID NO: 12420 - protein, 152 aa, Homo sapiens
  DOMAIN (63)..(106): Ribosomal protein S4 proteins domain identified by eMATRIX, accession number BL00632, p-value=4.000e-38, raw score of 23.79
  DOMAIN (66)..(113): S4 domain identified by PFam, accession name S4, E-value=4.6e -16, PFam score of 66.8
PVARSWVCRKTYVTPRRPFEKSRLDQELKLIGNALLRRLVRIGVLDEGKMKLDYILGLKIEDFLERRLQTQVFKLGLAKSIHHARVLIRQRHIRVRKQVVNIPSFIVRLDSQKHIDFSLRSPYGGGRPGRVKRKNAKKGQGGAGAGDDEEED

SEQ ID NO: 12421 - protein, 75 aa, Homo sapiens
  misc_feature (1)...(75): Xaa = X or * as defined in Table 2
XVHLVKASCQACGQLDRVRKQVVNIPSFIVRLDSQKHIDFSLRSPYGGGRPGRVKRKNAKKGQGGAGAGDDEEED

SEQ ID NO: 12422 - protein, 208 aa, Homo sapiens
  misc_feature (1)...(208): Xaa = X or * as defined in Table 2
PVARSWVCRKTYGDPRGGPFEKSRLDQELKLIGGVWGSGTKREVLRVKFTLAQDSAKAAPGNWLTLDEKDPTGVLFERQTPLLRRGLVPQLGCWDEGQKMKLDYIPGPXRLEDFFRETPCKTQVFQSLGLAKSIHQPRFACLGSRQRHIRVRKQVVNIPSFIVRLDSQKHIDFSLRSPYGGGRPARVKRKNAKKGQGGAGAGDDEEED

SEQ ID NO: 12423 - protein, 143 aa, Homo sapiens
  misc_feature (1)...(143): Xaa = X or * as defined in Table 2
VCIGVLLCCLGCGVRWHDHASLXPXPPGLKRSSHLSLLSTWDHRHMLTHPLNFFIVEPRSHYVAQTGLKLLGSSSPPASASQSARITGVSHHTQSKKXFLFVEPRSHYVAQTGLKLLGSSSPPASASQSARITGVSHHTQSKK

SEQ ID NO: 12424 - protein, 94 aa, Homo sapiens
  DOMAIN (65)..(89): VACUOLAR ATP SYNTHASE 16 KD SUBUNIT SIGNATURE domain identified by eMATRIX, accession number PR00122D, p-value=7.214e- 11, raw score of 9.97
  DOMAIN (11)..(89): ATP synthase subunit C domain identified by PFam, accession name ATP-synt_C, E-value=0.0056, PFam score of 17.8
WFLTETSPFMWSNLGIGLSISLSVVGAAWGIYITGSSIIGGGVKAPRIKTKNLADAQNPSLFVKILIVEIFGSAIGLFGVIVAILQTSRVKMGD

SEQ ID NO: 12425 - protein, 258 aa, Homo sapiens
  misc_feature (1)...(258): Xaa = X or * as defined in Table 2
MTGLALLYSGVFVAFWACALAVACWVNSGTDWAGGIWLERLLPRSRLGFGLAGGDPACAGVCYTIFDLGFRFDVAWFLTETSPFMWSNLGIGLAISLSVVGAAWGHSILTGSSIHVVEGSXKAPRDSKTKNLVSIIFCEAVAIYGIIMGNCSLSNMTEPFSATEPQGHRQFGNXPWQGYSHGLGAGLHRKPCLNLFCGVCVGIVGTWGCPWQMPQNPTASLCKRFSIVEIFWQAPLALFGVIGRKFFKTSMSERWVTR

SEQ ID NO: 12426 - protein, 116 aa, Homo sapiens
DEDSLHSVPVAQMGNYQEYLKTLASPLREIDPDQPKRLHTFGNPFKQDKKGMMIDEADEFVAGPQNKVKRPGEPNSPMSSKRRRNATIIHDGHEEKMENGQITPDGFLSKSAPSEL

SEQ ID NO: 12427 - protein, 332 aa, Homo sapiens
  misc_feature (1)...(332): Xaa = X or * as defined in Table 2
NLLKTHKFLLGQDEDSLHSVPVAQMGNYQEYLKTLASPLREIDPDQPKRLHTFGNPFKQDKKGMMIDEADEFVAGPQNKVKRPGEPNMSYVTKRRRSMSLLLRKPQTPPTCNNHVGGKGPPSASWFPSYPNLIKPTLVHTDATIIHDGHEEKMENGQITPDGFLSKSAPSELINMTGDLMPPNQVDSLSDDFTSLSKDGLIQNLVVTHLXEEPKTAASPXMTKKTQXHLLWELCQIHYKSLLLWHKEVNADIKHQLMKEVRKFGRKYERIFILLEEVQGPLEMKKQFVEFTIKEAARFKRRVLIQYLEKVLEKINSHHLHNNISHINSRSSC

SEQ ID NO: 12428 - protein, 110 aa, Homo sapiens
  misc_feature (1)...(110): Xaa = X or * as defined in Table 2
ITLSLLSFFNLRPSFALLAQAGVHWRDLDSLQPPPLRFKXFSYLKSPRSWDYGHAPPRPANSVLLVETGSLHVSQGGLILPTSGDPPASASQSAGITGVTNCARPPSLFS

SEQ ID NO: 12429 - protein, 169 aa, Homo sapiens
  misc_feature (1)...(169): Xaa = X or * as defined in Table 2
NKTRKDPFPPYTPAHGHTPPTPSLPFGCSAHGHLKPRGSHCDQPPSTCRPPVQSPVAHASQVAGRTWAXKRALHLPGGGVKRKGTGSPKAPRSGCGLPYKLGSTARAAGSCSPAEEPETFSPQGQPLPVNKGKLRRVGQPSFQCAPRDSCSRYFQFGEEQGRAIEHQIP

SEQ ID NO: 12430 - protein, 203 aa, Homo sapiens
  DOMAIN (103)..(150): Ribosomal protein S7 proteins domain identified by eMATRIX, accession number BL00052A, p-value=2.615e-19, raw score of 27.85
  DOMAIN (49)..(203): Ribosomal protein S7p/S5e domain identified by PFam, accession name Ribosomal_S7, E-value=5.7e-40, PFam score of 146.2
  misc_feature (1)...(203): Xaa = X or * as defined in Table 2
XGRQQHQRWHETPDIKLFGKWSTDDVQINDISLQDYIAVKEKYAKYLPHSAGRYAAKRFRKAQCPIVERLTNSMMMHGRNNGQEAHDCAHRQACLRDHNTCSQAKNLLEVRGTAIINSGPREDSTRIGRAGTVRRQAVDVSPLRRVNQAIWLLCTGAREAAFRNIKTIAECLADELINAAKGSSNSYAINKKDELERVAKSNR

SEQ ID NO: 12431 - protein, 53 aa, Homo sapiens
VHYCDRQSGKECVTCLTLAPVQMTFHAIGSSIEASHDQAALSALKQFSEQGLD

SEQ ID NO: 12432 - protein, 84 aa, Homo sapiens
  misc_feature (1)...(84): Xaa = X or * as defined in Table 2
GPRERETGRTATAVEPDSCEERTYSNDTKRWCSSHPGGNGGVPERQHLGXATGSWGAKPLRLAAATRASGNPGHRSLKCLETIF

SEQ ID NO: 12433 - protein, 458 aa, Homo sapiens
  DOMAIN (78)..(92): PROTEIN RNA-BINDING RNA REPEAT HYD domain identified by eMATRIX, accession number PD00567B, p-value=2.853e-09, raw score of 18.23
  DOMAIN (54)..(222): Double-stranded RNA binding motif domain identified by PFam, accession name dsrm, E-value=1.4e-32, PFam score of 121.7
  misc_feature (1)...(458): Xaa = X or * as defined in Table 2
NEFFGEGKTLQAARHFAAMKALQALQNEPIPERSPQNGESGKDMDDDKDANKSEISLVFEIALKRNMPVSFEVIKESGPPHMKSFVTRVSVGEFSAEGEGNSKKLSKKRAATTVLQELKKLPPLPVVEKPKHFFKKRPKTIVKAGPEYGQGMNPISRLAQIQQAKKEKEPDYVLLSERGMPXRREFVMQVKVGNEVATGTGPNKKAKKKKNVAVAMLLQLGYKASINLQDQLEKTGENKGWSDPTPGFPEPTNNTPKGILHLSPDVYQEMEASHHKVTSGHYSRLFVTQRYEPTFKLFSSVYLPHRIVQSTFARHLLMNGTSSTAEAIGLKGSSPIPLVPPVQPSKQLGIFSKGFKAFRVHYCDRQKWQRVCDLSDISPCADGLSHAIGSSIEASHDQAALSALKQFSEQGLDPIDGSMNIEKGSLEKQAKHLIKKVDHNQAPPGSIAHDCKISNSAV

SEQ ID NO: 12434 - protein, 114 aa, Homo sapiens
  DOMAIN (56)..(105): kw TRANSCRIPTASE REVERSE II ORF2 domain identified by eMATRIX, accession number DM01354Z, p-value=1.175e-10, raw score of 9.06
  misc_feature (1)...(114): Xaa = X or * as defined in Table 2
SSTSLIRKMQIKTTRYQNIPNRMAKIKNADNTKLWSRILTNYWWEYRHLHKXKYVHKKTCNFMLIAALFIKFLKWKKFKHSSTGEXIIKLXDRHMTEYYXAIKKAQATDRMQHE

SEQ ID NO: 12435 - protein, 395 aa, Homo sapiens
  DOMAIN (290)..(301): Tyrosine specific protein phosphatases proteins domain identified by eMATRIX, accession number BL00383E, p-value=1.000e- 14, raw score of 10.35
  DOMAIN (119)..(351): Protein-tyrosine phosphatase domain identified by PFam, accession name Y_phosphatase, E-value=1.8e-110, PFam score of 380.4
  misc_feature (1)...(395): Xaa = X or * as defined in Table 2
GEPLILHHTTCHNSKALIAFLAFLIIVTSIALLVVLTNIYDLHRKRSCNVDEQQELVERYDESNLMNVQPIHADIMLETYHRRIADEGRLFLAEFQSIPRVFSKFPIKEARKTHNQNKNRYVDILPYDYNRVELSEINGDAGSNYINASYIDGFKEPRKYIAAQGPRDETVDDFWRMIWEQKATVIVMVTRCEEGNRNKCAEYWPSMEEGTRAFGECCCKDLTKHKRCPDYIIQKLNIVNKKEKATGREVTHIQFTSWPDHGVPEDPHLLLKLRRRVNAFSNFFSGPIVVHCSAGVGRTGTYIGIDAMLEGLEAENKVDVYGYVVKLRRQRCLMVQVEVCSNLXDYSHFGFLDLNLFQVIIMIFFKNPNSSQPQTVDDFLKTKTWXSPWPMLCIW

SEQ ID NO: 12436 - protein, 440 aa, Homo sapiens
  misc_feature (1)...(440): Xaa = X or * as defined in Table 2
MEDSRKAQKRDTKIEREEQLYWPSRKSRGKSKGDLVLHTTYKPSHSGGRAVSGLFGSPIPSLGSWTAFLDPPWARVEPIALKGLTQRSPNGGGHRVCFVIPPAPPDGSEQKKRLCSFRRKEQSLPGNLENSFGSCPRLSRQYVYESARTTALMRLGCPLKQIQLISQDLSPFEYRESLPMKDKQNKHQRISLSINTIQETIISPNELSKSPGTNSGETEIHDLSDREFKIAVLRTLKEIQDNTEKEFKLYQINLTKRIEIIKKNQAEILELRNAIGIQKNASQSFNSRNGREEEIISELENRLFENTQRRQNKRIKNNKACLQDLEYRLKRANLRVIGLKEEVEKAIGVESLFKGIITENFPSLEQDINIQVQEGYGTPSRFNPKKTTSRHLIVKLPKIRDKERILKVTRENKQVTXNGTHICLAADFSVVALXARREWH

SEQ ID NO: 12437 - protein, 362 aa, Homo sapiens
  DOMAIN (287)..(306): TYPE III EGF-LIKE SIGNATURE domain identified by eMATRIX, accession number PR00011B, p-value=9.135e-15, raw score of 13.08
  DOMAIN (17)..(305): EGF-like domain identified by PFam, accession name EGF, E- value=1.8e-15, PFam score of 64.9
  misc_feature (1)...(362): Xaa = X or * as defined in Table 2
GSGCEQGCPPGRYGPGCEQLCGCLNGGSCDAATGACRCPTGFLGTDCNLTCPQGRFGPNCTHVCGCGQGAACDPVTGTCLCPPGRAGVRCERGCPQNRFGVGCEHTCSCRNGGLCHASNGSCSCGLGWTGRHCELACPPGRYGAACHLECSCHNNSTCEPATGTCRCGPGFYGQACEHPCPPGFHGAGCQGLCRCQHGAPCDPISGRCLCPAGFHGHFCERGCEPGSFGEGCHQRCDCDGGAPCDPVTGLCLCPPGRSGATCNLDCRRGQFGPSCTLHCDCGGGADCDPVSGQCHCVDGYMGPTCREVGPSGSPRTRPXPRGPAAAPLGSSGRTATSPVRRAASAPTAPTCVGVGRGRPATL

SEQ ID NO: 12438 - protein, 281 aa, Homo sapiens
  misc_feature (1)...(281): Xaa = X or * as defined in Table 2
LLLIHSEEKPFEDNLYGKALSSNSHLHGPRRLCTGENPEECEQLXKAFSAISRDSCDSSHXGRKPVKVSEGFSDSHPLRHTGNHTMEQHSEMRNTLQQKCSHYXANYSVVFCSXLWESLECSIGFXGDLRINSGENAPFEHHQYWRAFWFSTFVKETWXSIHTTEKPWKFXEEEKAFSDASVLGKHMELLPGCKTYEYINIGKFFSDSSLSCIWRELTWRNPXECNQCXDAFSLNSSLSGHQFSLGTKKYNHCFECGISFIQCLICRLDCWLINFFSLFFF

SEQ ID NO: 12439 - protein, 59 aa, Homo sapiens
  DOMAIN (17)..(48): kw TRANSCRIPTASE REVERSE II ORF2 domain identified by eMATRIX, accession number DM01354G, p-value=4.120e-19, raw score of 11.57
  misc_feature (1)...(59): Xaa = X or * as defined in Table 2
EIEDLNXTITQLYLTXHLYRTLHRTPPAYKFFSSVHETFSRIDHVLEHKTSLNEFXRLK

SEQ ID NO: 12440 - protein, 41 aa, Homo sapiens
  misc_feature (1)...(41): Xaa = X or * as defined in Table 2
QPGFGAGARAPNILTHKHLGLLEFKTTGAQQQGFXLNESSF

SEQ ID NO: 12441 - protein, 55 aa, Homo sapiens
  misc_feature (1)...(55): Xaa = X or * as defined in Table 2
PPPPPFPLIPDXGXPPSPLSPGQLQLSAPPPPLPCPDITLSYPGRRPVLGLSLMD

SEQ ID NO: 12442 - protein, 139 aa, Homo sapiens
  misc_feature (1)...(139): Xaa = X or * as defined in Table 2
IPALPXFYFIFVYLNILKYLFFFFDDGVLLCCPAWSAVAXSRLTATFASQVKRFSCLSLLSSWYYRSVPSSLANFCIFSRDGSFIVLAMLVLNSXPQVILLPWPPKVLXLPIMECSSLTIAHCSLNLPGTSNPPASASK

SEQ ID NO: 12443 - protein, 124 aa, Homo sapiens
  misc_feature (1)...(124): Xaa = X or * as defined in Table 2
AYPLRGGRDFLRGGPSRSVSLLSVVPARVXRRRRRLREEARGAMTSASTKVGEIFSAAGAAFTKLGELTMQLHPVADSSPAGAKWTETEIEMLRAAVKRFGDDLNHISCVIKGPDKGHCETQGI

SEQ ID NO: 12444 - protein, 112 aa, Homo sapiens
  misc_feature (1)...(112): Xaa = X or * as defined in Table 2
SLIFSDSLSSISGTNTLAAFLSWMLPYIPWILQARPALGLLHLLLAACNVVGQSATXPSPSLPLGLCSSSHSQXGLFXPPVFKISPLITDNPNPFDLHLMDIFIQKTIKISL

SEQ ID NO: 12445 - protein, 58 aa, Homo sapiens
TVKRKVYEDSGIPLPAESPKKGPKKVASGVLSPPPAAPPPSSSSVPEAGGPPHKETEG

SEQ ID NO: 12446 - protein, 173 aa, Homo sapiens
  DOMAIN (81)..(100): PLANT THIONIN SIGNATURE domain identified by eMATRIX, accession number PR00287A, p-value=7.513e-09, raw score of 9.08
  misc_feature (1)...(173): Xaa = X or * as defined in Table 2
RAAQSPCSPWSRLACSGGGGVIREEARGAMTSASTKVGEIFSAAGAAFTKLGELTMQLHPVADSSPAGAKWTETEIEMPEGCCEAIWGRSXSHQLCHQGTDSGPDKGHCXNARYIEDFWASPFPAXVIPRKGPRRWASGVFVHLLQLAPPPKQLPVFPEGRGSPPIKETERLM

SEQ ID NO: 12447 - protein, 234 aa, Homo sapiens
  DOMAIN (22)..(198): Myosin tail domain identified by PFam, accession name Myosin_tail, E-value=0.054, PFam score of 10.8
  misc_feature (1)...(234): Xaa = X or * as defined in Table 2
GAKFQRTRSVPRTTGPGQLKCLEDKVSRLETELDEEKNTVELLTDRLNRGRDQVDQLRTELMQERSSSGRTWKCDKISLERQNKDLKTRLASSEGSPESLVPASLSLSPRISCCRERLPAEQRVKTVLRSTNRKLERKVNXLSLQIEDERHHVSDTKDQLSLRVKALKRQVDEAKEEIERLDGLRKKAQREVEEQHEVNEQLQARIKSLEKDSWRKGFPLSCXVSSQKRRAELR

SEQ ID NO: 12448 - protein, 109 aa, Homo sapiens
  misc_feature (1)...(109): Xaa = X or * as defined in Table 2
DVKSKSFFFFLRWSLNPFAQAGVXWHDLSSLQPLPHRFKQFSCLSLLSSXDYRRVPPXLANFLYFXXRQGFTMLARLASNSXPHDPPASASQSAGITGMSHRTQKKQIS

SEQ ID NO: 12449 - protein, 77 aa, Homo sapiens
  misc_feature (1)...(77): Xaa = X or * as defined in Table 2
FNCCEEEKFKKKPCFVSFLEGLERGXVKCQEHIPDTHXXXLLGLSEQINSDSRLRKELNHFILFLEQLTCPPHSRER

SEQ ID NO: 12450 - protein, 177 aa, Homo sapiens
  DOMAIN (39)..(59): APPLE DOMAIN SIGNATURE domain identified by eMATRIX, accession number PR00005A, p-value=2.663e-09, raw score of 12.01
  misc_feature (1)...(177): Xaa = X or * as defined in Table 2
YNFFLNEMGSCSVAQAGVQWHNHSSLQPXTLGXSSYHPASASXVAGTVCTCHHVQLVFIFFFLRXSFALVAQAGVQWCDLGSLPPPPSGFERFSCLGLPSSWDYRRPPLHLVNFFFLYFXXRWGFTMLARLVSNSXPHDHPASASQSAGITGMSHHVWLINFFFNCKSLIFSNVFRN

SEQ ID NO: 12451 - protein, 301 aa, Homo sapiens
TMNTRNRGVNSGLGASPASRPTRDPQDPSGRQGELSPVEDQREGLEAAPKGPSRESVVHAGQRRTSAYTLIAPNINRRNEIQRIAELELANLEKWKEQNRAKPVHLVPRRLGGSQSETEVRQKQQLQLMQSKYKQKLKREESVRIKKEAEEAELQKMKAIQREKSNKLEEKKRLQENLRREAFREHQQYKTAEFLRQTEHRIARQKCLSKCCLWPTILNMGQKLGLQDSLKAEENRKLQKMKDEQHQKSELLELKRQQQEQERAKIHQTEHRRVNNAFLDRLRRQKSTRWPRAIWRLLEYE

SEQ ID NO: 12452 - protein, 77 aa, Homo sapiens
  misc_feature (1)...(77): Xaa = X or * as defined in Table 2
IKRFSYLSLPNSWDYKVPSSMPGXFLYFXLRXGFTNVGQAGFEIPXPQNDSNPLSSQSAGITGMSHHNRPPLFYFLK

SEQ ID NO: 12453 - protein, 114 aa, Homo sapiens
  misc_feature (1)...(114): Xaa = X or * as defined in Table 2
LNIHRKFMLLYYHXLLLFLFHFXDRVSVCHPGWSTVVNSQGFTAALTYWVKXSSCFNPPCVSWEPRGACHHALANFLIFCKNQVSLCLPRLVSNSWVQAILPSWPPRRAGIYGV

SEQ ID NO: 12454 - protein, 102 aa, Homo sapiens
  misc_feature (1)...(102): Xaa = X or * as defined in Table 2
FFFFETESHSVAQAGVQWGDLGLLXSSPPGSSDSPASASXASGTTGAQHHAQLIFVFSVETGFHPVSQDGLDLLTSXSARLSLPKSWDYRHEPLAPGLGFTF

SEQ ID NO: 12455 - protein, 95 aa, Homo sapiens
  DOMAIN (13)..(46): LacY family proton/sugar symporters proteins domain identified by eMATRIX, accession number BL00896A, p-value=4.908e- 12, raw score of 14.92
LIFFLFSFFFFSFFFFFFFFFFFFFFFFFFFFFFFFFFLLLLLLLLLLLLLFFFFFFFFFFFFFFLRQSLDSVAQAGVQWRHLGSLQALPPRFAP

SEQ ID NO: 12456 - protein, 244 aa, Homo sapiens
  DOMAIN (74)..(107): LacY family proton/sugar symporters proteins domain identified by eMATRIX, accession number BL00896A, p-value=2.709e- 11, raw score of 14.92
  misc_feature (1)...(244): Xaa = X or * as defined in Table 2
QSGHRYLYNILIIQVLCFTIFLFLRQDLAVLTQAGVQWCDSWQPRPPGLKGTPTSAAQVAGTTGMCHHTRXIFFFFFFFFFFFFFFFFFFFFFFFFFLRQSLDSVAQAGVQWRNLGSLQPLPPRFKRFSCLGLPSSWDYRNAPPHPANCCIFMXRRGFTMLAKLVLNSGDSPASASQSAGIIGVSHHARPPRYFKKYIFCRDGGLTMLLGWSXTPGLKQSSHLGFPNFWDYRCEPPCLATLFIL

SEQ ID NO: 12457 - protein, 73 aa, Homo sapiens
  misc_feature (1)...(73): Xaa = X or * as defined in Table 2
ETGSHFVTQAGVXWCNLGLLQPLTPGLKQFSHLSPPSSWDHKCVPSCPANSFCTLGKXRRVSTMLPPGWSQTP

SEQ ID NO: 12458 - protein, 77 aa, Homo sapiens
  misc_feature (1)...(77): Xaa = X or * as defined in Table 2
LRQSFAGWPRLECNGTIPAYCNLHLLGSSNPPASSPRRLIFVVLVEMRFLYVAXAGLELLSSSDLPPWHRKVLGLQA

SEQ ID NO: 12459 - protein, 65 aa, Homo sapiens
  misc_feature (1)...(65): Xaa = X or * as defined in Table 2
FFLINLTLLIVTAQFINXLDFIDSYSTICPKPPEYTFFSRAPNGTFTTKDHILGFKISLNKYKSI

SEQ ID NO: 12460 - protein, 162 aa, Homo sapiens
  misc_feature (1)...(162): Xaa = X or * as defined in Table 2
SCWSPVWGHPPRDREPPPSXLGIQSSPGVPQAALPPWPSPASHQASATWAVLPLPPLQGPAREPPCPPHLRRHVQPTKTSAVSILSAPPLPPPGXDLPEASFSQWACKGINKCLQGLGLVCRRTEHKDLGLGLFGPLVLAMVEVRGVDLTENNSGASVPRGR

SEQ ID NO: 12461 - protein, 87 aa, Homo sapiens
  misc_feature (1)...(87): Xaa = X or * as defined in Table 2
FYFFYFYFLRQSCSVNQAGVQXHCLNSLQPPPPGFKRFSCLSLPSRWDYKCPPPCTPNFCVFSEMGFLHVGQAGLELMTSGDPPGFG

SEQ ID NO: 12462 - protein, 406 aa, Homo sapiens
  DOMAIN (353)..(366): PROTEIN ZINC-FINGER METAL-BINDI domain identified by eMATRIX, accession number PD00066, p-value=4.462e-15, raw score of 13.92
  DOMAIN (74)..(406): Zinc finger, C2H2 type domain identified by PFam, accession name zf-C2H2, E-value=5e-75, PFam score of 262.7
EAASKTTKDNICSWKDDTIGCKEMPTSENCPSFALHQKISDRNHGECREYGKTLCQDSKPVQHERIHSSEKPNRCKECGKNFSNGHQLTIHQRLHVGEKPYKYEKCGKAFISGSAFVKHGRIHTGEKPLKCKQCGKTISGSYQLTVHKSIHTGKKPYECGECGKAFLVYGKLTRHQSTHTGEKPFGCEECGKAFSTFSYLVQHQRIHTSEKPYECKECGKAFSTSSPLAKHQRIHTGEKPYECKECGKSFTVYGQLTRHQSIHTGEKPFESIHAEIKPYRCKECGRTFSRASYLVQHGRLHTGEKPYECKECGKAFSTGSYLVQHQRIHTGEKPYECKECGKAFISRHQLTVHQRVHTGEKPYECKECGKAFRVHVHLTQHRKIHTDVKPYECKECGKTFSRASYL

SEQ ID NO: 12463 - protein, 191 aa, Homo sapiens
  misc_feature (1)...(191): Xaa = X or * as defined in Table 2
RWGFTKLPRLVSNSWPQAILSPWLPKVLNNHREALYFSLYYISKYTEGQFRNRLYPGTICQDYLWRYLLFLFIFETESCTVIRLECSGSLQPPPPRFKQFTCLRLHSSWDYRRPPPWPINFCISRVQTGFHHVGQGGLDLVDLCDPPASASQSAGITGREHPAPGTYLWEGFKKSFKSRAXRSTLFFPLLH

SEQ ID NO: 12464 - protein, 97 aa, Homo sapiens
  misc_feature (1)...(97): Xaa = X or * as defined in Table 2
LERMSFGHIQTKEDILQENTIFIATEVQIQPNPDXTPEAKAFIRRCLSYRKEDRIDVHQLTCDPYLMPHMRMSVSTCSPAGAAIASTSGASSSSSSN

SEQ ID NO: 12465 - protein, 95 aa, Homo sapiens
  DOMAIN (27)..(64): Eukaryotic protein kinase domain identified by PFam, accession name pkinase, E-value=0.0016, PFam score of 16.6
RKPFGHNQSQQDILQENTILKATEVQFPPKPVVTPEAKAFIRRCLAYRKEDRIDVQQLACDPYLLPHIRKSVSTSSPAGAAIASTSGASNNSSSN

SEQ ID NO: 12466 - protein, 311 aa, Homo sapiens
  misc_feature (1)...(311): Xaa = X or * as defined in Table 2
HRILEPLIFHFFFFFSSAPPQPPELLYPASLTLPASPGREEVYPLPARLPSLPRWEPLQVWLALGAVKLPLSPPWSGPNGLGKPPGTPKRRGALFCHMPGILTPWMPGARWTKPPANPPSTTSPVPPKDGXKLQPGGLRGKPGPERGWNPPCPRSPRPPYLLCXPQTLPRAXCFPIPKMSFTGHSPCRASLGHLEVGHGIPLWPRVCQRRKSRAFFVLFFFKGACLFNVNNRKPXYLFCNTEXYFNVHVLDVHNIFITKQQESTXPWLPRGVSWLGAGGGYQGAWDREAPPPRPIPKLPPTLASRMRSCHL

SEQ ID NO: 12467 - protein, 157 aa, Homo sapiens
  DOMAIN (83)..(119): REDUCTASE PAPS BIOSYNTHESIS PHOSPHOADENO domain identified by eMATRIX, accession number PD01769C, p-value=3.875e-12, raw score of 21.60
GPRPAVVKRQNRQVPSTQDPLFPGYGPQCPVDLAGPPCLRPLFGGLGGYWRALQRGREGRTMTSRASELSPGRSVTAGIIIVGDEILKDWTYRDIWDFLRQLFVPYCILYDRGYTSLGSRENTVRNPALKCLSPGGHPTYRPAYLLENEEEERNSRT

SEQ ID NO: 12468 - protein, 113 aa, Homo sapiens
  misc_feature (1)...(113): Xaa = X or * as defined in Table 2
DGVLPSLLGWEVMCGSSAPLLRSPVDRLDGMWGVCHPGWSIVAQSQFTAASNLLASRATLSLPSSWDYRRVPPHSAHFKFFLXKWGLAMLPRLVLNSWSQVILLPQPPKVLEL

SEQ ID NO: 12469 - protein, 33 aa, Homo sapiens
ASHPLQGLLCGPSLLDEHHPLLHGAQSHRPPKG

SEQ ID NO: 12470 - protein, 66 aa, Homo sapiens
GILALVPAECDADVPWTEIRRNLDKLQRGAPIPLASRSLYSRNPFLTSAGPDHWSILHELSLPGGW

SEQ ID NO: 12471 - protein, 65 aa, Homo sapiens
LHFYQQNYDNPSDFTFLTTLGIVNSFNNIHSNVYVVVRGDSVLAVLTALTRSQRLLCLGSHFGGT

SEQ ID NO: 12472 - protein, 166 aa, Homo sapiens
  misc_feature (1)...(166): Xaa = X or * as defined in Table 2
CPRMTPKDFQXPVLVVTNLLGHVIDIKWMSIAFINDRAWPSAFVSDENHARIQCDGQHRFEVSVSELPDETDVSSTVLDLDHQGLGPPPPPAEPDPLQLLLQQLFGLGQLSCVVGPGPWRGLSSARDKQNIMVSIIHKVKRPQSPLRAVYWPLRYCILPSRRATVN

SEQ ID NO: 12473 - protein, 122 aa, Homo sapiens
DRVSLSPRLECSGVILAQCNLHLPGFNRFSTLGLPSRLGITGHAPLCLGQFFVFLVEDGGFHHVGQAGLELLTSSDPPTSAVPKCRDYRHEPLRLACCSFLKQENIHINCWVRIYIRIFQTN

SEQ ID NO: 12474 - protein, 70 aa, Homo sapiens
  misc_feature (1)...(70): Xaa = X or * as defined in Table 2
PIWLSLSPWHFINQRKEKKKXXDIVKREKPLMGLSTLTSIXMQSKPRKEHQINLKSEIKXLQDLSQYFGR

SEQ ID NO: 12475 - protein, 123 aa, Homo sapiens
  DOMAIN (1)..(24): LACY PROTON/SUGAR SYMPORTER SIGNATURE domain identified by eMATRIX, accession number PR00174A, p-value=5.500e-09, raw score of 8.67
  misc_feature (1)...(123): Xaa = X or * as defined in Table 2
FFFFFFFFFFKLAMFVFILFFIFSKXKEIVLSQFLFVFLIYLFYVFTSLKVALKISRDIKSTFLRVALFFFLNNSWEFCGSTAFPSVSMLCMFXLLLXFFFFFFFFFFKLAMFVFILFFIFSK

SEQ ID NO: 12476 - protein, 255 aa, Homo sapiens
  misc_feature (1)...(255): Xaa = X or * as defined in Table 2
VTIPLIPDLKGSSCVGPPKPXDCRHWTPCLTLIYFFFFKVESPSVAHAGVQWHDLSSLLTLSPDQVHSPVSAFXVAGIQGMHHHARLIFFFFFFFLRQSLSSVAQAREQWCYHGSLQPPPSGFKRFSCLSLPSSWDYRCPPPHLADFFVFLIEMGFTMLTRLVSNSXPQCDLPASASQTAWITGLSHRAWLNFFCIFSIYGVSPCWPGWSLTPDLKXSACLSLPXCWDYKCEPPCPAQFTFIRKDSFADVYCSVS

SEQ ID NO: 12477 - protein, 47 aa, Homo sapiens
MESRSVARLECNGAISAHCNLHLLGSNDSPASASRVAGTTGTATTPG

SEQ ID NO: 12478 - protein, 35 aa, Homo sapiens
MNKMESLFYCFNADILIKQDYFHHHQHLYIYTKPV

SEQ ID NO: 12479 - protein, 103 aa, Homo sapiens
  misc_feature (1)...(103): Xaa = X or * as defined in Table 2
WLQICVSGCICTXMALYICINVVVVKVVLFYEDVCIKAVKXAFHFIHNLMCVYICMCVCVWNIEGLYIPPQRYIHMAVLLHRSNSQTPGSIRYKFKISFIGFI

SEQ ID NO: 12480 - protein, 364 aa, Homo sapiens
  misc_feature (1)...(364): Xaa = X or * as defined in Table 2
FALAARLQEFGTRKYFTESGLVGLLEQAAASFSMAGMYEAVNEVYKVLIPIHEANRDAKKLSTIHGKLQEAFSKIVHQSTGWERMFGTYFRVGFYGTKFGDLDEQEFVYKEPAITKLAEISHRLEGFYGERFGEDVVEVIKDSNPVDKCKLDPNKAYIQITYVEPYFDTYEMKDRITYFRQKLQSSVRFMYCTPFTLDGRAHGGTSMEQFQKGRPILDYVSCLFPYIKTRGPMSLIKKRSSLHPFEVAIEDMQKKTQELAFATHQDPADPKMLQMVLQGSVGHQVNQGPLGSCPGFFCSGNTXXPKALSDIHXKLATLAFKDFTKRCEDALRKNKSLIGPDQKEYQRELGEKLSSALKRALPAT

SEQ ID NO: 12481 - protein, 338 aa, Homo sapiens
  DOMAIN (237)..(286): kw TRANSCRIPTASE REVERSE II ORF2 domain identified by eMATRIX, accession number DM01354Z, p-value=1.542e-17, raw score of 9.06
  misc_feature (1)...(338): Xaa = X or * as defined in Table 2
RCWENCTSTCKTMKSDPYLRPYTTINSKWIKDLNVRPETIEENIGEKFLDMTLGNDFLDITPKAQSTKTKDKWDYIKPKSFCTVKETVNKMKQXPTDWXKIFVRHIYGKGLVSKIYKEFIQLNFXKWAKDLKRHFSEDDTQMANRYIKGCSTXLIIKEMHFKNHSKYYLSPVRLAVIKKNKNNKCWXWCGIKGTLLHCWWECRLVQPLWKTEWKFLRKIKLPYDPAIPLLGIYSKXMKSPPCKYICSRVFIAALFIVAKTWRQLKCPLTVXIRKLCIYMPYTPMEYYPPLKTKKNPTISCHLLPTWMGLKDTVLNEISQTEKKILHNFTIYVESKKKI

SEQ ID NO: 12482 - protein, 270 aa, Homo sapiens
  misc_feature (1)...(270): Xaa = X or * as defined in Table 2
PLALALAMAYPSCPGDAHGPPRPGPLSPPSXPASVPTSPPQSSAXFLCPQSYPVEGLTPRILPAGGGHVPCSRPSSSPGLASVSAPRWGALLLPGPCPTSLSSGCRKGRASPRAHPPPTASLCTALWPPCFSPPXPGVGLGNGLSLLPRRCTWPAAARSTVSSLLACLCPNSPLNLLRDSSVLSHTQLRGSPHGFYPLEGAMFPAPALPPHQALPRYQPPGGELCCCLDHALLPSPRDVGKGGPALELTHPPQQACVLRSGHLASRLHNL

SEQ ID NO: 12483 - protein, 97 aa, Homo sapiens
  misc_feature (1)...(97): Xaa = X or * as defined in Table 2
KFHLGGGGWFPPLFPGPGGARGVGSXVRGFRPPWAPPLNPPFPFKPQNSPGLVVFAFRPSSSGGPGPGNSPHPGGQGFGXQKFRPCPSAWGTKGGFP

SEQ ID NO: 12484 - protein, 759 aa, Homo sapiens
  DOMAIN (657)..(729): Acetyltransferase (GNAT) family domain identified by PFam, accession name Acetyltransf, E-value=2.9e-12, PFam score of 54.2
MDSSIHLSSLISRHDDEATRTSTSEGLEEGEVEGETLLIVESEDQASVDLSHDQSGDSLNSDEGDVSWMEEQLSYFCDKCQKWIPASQLREQLSYLKGDNFFRFTCSDCSADGKEQYERLKLTWQQVVMLAMYNLSLEGSGRQGYFRWKEDICAFIEKHWTFLLGNRKKTSTWWSTVAGCLSVGSPMYFRSGAQEFGEPGWWKLVHNKPPTMKPEGEKLSASTLKIKASKPTLDPIITVEGLRKRASRNPVESAMELKEKRSRTQEAKDIRRAQKEAAGFLDRSTSSTPVKFISRGRRPDVILEKGEVIDFSSLSSSDRTPLTSPSPSPSLDFSAPGTPASHSATPSLLSEADLIPDVMPPQALFHDDDEMEGDGVIDPGMEYVPPPAGSVASGPVVGVRKKVRGPEQIKQEVESEEEKPDRMDIDSEDTDSNTSLQTRAREKRKPQLEKDTKPKEPRYTPVSIYEEKLLLKRLEACPGAVAMTPEARRLKRKLIVRQAKRDRGLPLFDLDQVVNAALLLVDGIYGAKEGGISRLPAGQATYRTTCQDFRILDRYQTSLPSRKGFRHQTTKFLYRLVGSEDMAVDQSIVSPYTSRILKPYIRSDPHWTPEPDAPLDYCYVRPNHIPTINSMCQEFFWPGIDLSECLQYPDFSVVVLYKKVIIAFGFMVPDVKYNEAYISFLFVHPEWRRAGIATFMIYHLIQTCMGKDVTLHVSASNPAMLLYQKFGFKTEEYVLDFYDKYYPLESTECKHAFFLRLRR

SEQ ID NO: 12485 - protein, 108 aa, Homo sapiens
  misc_feature (1)...(108): Xaa = X or * as defined in Table 2
IIAHCKLKRPSSNDPPQPPSSWDCRHAPPHPANXFFFXEMGSCHVAQTSSQTPALNPSRYPPTSASQGAEITVMSHCAQLYPCFLTKEKFSHSXIRRTLLSETSNGEY

SEQ ID NO: 12486 - protein, 90 aa, Homo sapiens
  misc_feature (1)...(90): Xaa = X or * as defined in Table 2
FQSQNIKLNLMGVLFCFETEAHSVTXAGLQWLDLSSLQPPPPGFKQFSCLSLLSSWDYRSPPRGPVNFCIFSGDEVSPYWSGWSQTSDLK

SEQ ID NO: 12487 - protein, 354 aa, Homo sapiens
  DOMAIN (278)..(296): Immunoglobulins and major histocompatibility complex proteins domain identified by eMATRIX, accession number BL00290B, p-value= 4.000e-21, raw score of 13.17
  DOMAIN (23)..(209): Class I Histocompatibility antigen, domains domain identified by PFam, accession name MHC_I, E-value=1e-99, PFam score of 344.7
  misc_feature (1)...(354): Xaa = X or * as defined in Table 2
MVDGTLLLLLSEALALTQTWAGSHSLKYFHTSVSRPGRGEPRFISVGYVDDTQFVRFDNDAASPRMVPRAPWMEQEGSEYWDRETRSARDTAQIFRVNLRTLARLYXQSERRPGSHTLQWMHGCELGPDNASFRGYEQFAYDGKDYLTLNEDLRSWTAVDTAAQISEQKSNDASEADHQRPYLQATFVDSFPKXLYEGKETFLHLEPPKTHVLHHPISDHEATLRCWALGFYPAEITLTWQQDGEGHTQDTELVETRPAGDGTFQKWAAVVVPSGEEQRYTCHVQHEGLPEPVTLRWEARFPSPPILPSWASLLGLVLLGSVVSEAVVAAVIWRKKSSGHFLPTGGKGGSYFKG

SEQ ID NO: 12488 - protein, 122 aa, Homo sapiens
  misc_feature (1)...(122): Xaa = X or * as defined in Table 2
KLQLLXFFFWFFFCLFTYFLETVECSGAIIAHCSLKLLGSSHPPASASLVAKITGACHPAWLIXVVLIVLFKRKWQSHLKLMVEKRFLSEGQILSVYHFRVPLLQNDRNLAQIILGRKREMY

SEQ ID NO: 12489 - protein, 93 aa, Homo sapiens
  misc_feature (1)...(93): Xaa = X or * as defined in Table 2
KKILRKKILRKSSVXIXDXSSQPENIPXKQFLSNHPKCTITLSMRNMSIMKKGGRISEDFIKLFFPSLLLSHLLVIEWGLYIEIYLTPPNNTF

SEQ ID NO: 12490 - protein, 73 aa, Homo sapiens
  misc_feature (1)...(73): Xaa = X or * as defined in Table 2
TLPCTLSTSSTPWSASSQEREMSFGDGXPVGXPPLTAVPCCSVWGLRRLXGERTKLGIGAAGGFHSYDGNTQT

SEQ ID NO: 12491 - protein, 79 aa, Homo sapiens
  misc_feature (1)...(79): Xaa = X or * as defined in Table 2
WSTVARSXLTATSCSFCLSPPSSWDCRRVPPCLASFHFQYIALNNXAXAIILPQPSKVLGLXASALQVAGTAGVYHHAW

SEQ ID NO: 12492 - protein, 123 aa, Homo sapiens
  misc_feature (1)...(123): Xaa = X or * as defined in Table 2
TGKNEIYCICFIDLEYQXKIGLLLHIGDKEEYSWNSGYFIGYCLELPCPVVKVSGNXNDSIEAAVLMTTPSKIKIXVTLQSKEASPIKVLTQVIGDIKGILENGHYKYQLXQFFKLQKGNDNH

SEQ ID NO: 12493 - protein, 159 aa, Homo sapiens
  DOMAIN (23)..(113): Retroviral aspartyl protease domain identified by PFam, accession name rvp, E-value=2.4e-06, PFam score of 27.6
  misc_feature (1)...(159): Xaa = X or * as defined in Table 2
AAEDXHCPIASETYKTITELWVTLPVEGKSVPFLINTEATHSTLPSFQGCVSLASITVVGIDGQASKPLKTPQLWCQLGQHSFMHSFLVIRTFPAPLLGRDILTNLSASLTIPGLEPHLIAAFCSSSKPPSHPPLVSLHLKPQVXDRLGNLQDHHRCFG

SEQ ID NO: 12494 - protein, 98 aa, Homo sapiens
PSTLSSLISRHDDEATRTSTSEGLEEGEVEGETLLIVESEDQASVDLSHDQSGGISLNSDEGDVSWMEEQLSYFCDKCQKWIPASKELLKSFDLSIPV

SEQ ID NO: 12495 - protein, 91 aa, Homo sapiens
  misc_feature (1)...(91): Xaa = X or * as defined in Table 2
ETESCSVARLECSGMISAHCNLCLPDTGNSPASASXVAGIIGACHHAQLIFVFLVETEFHHVFHHVGQASLEFLNLVIPPPRPPKALGLQG

SEQ ID NO: 12496 - protein, 337 aa, Homo sapiens
  DOMAIN (292)..(308): Calcium-binding EGF-like domain proteins pattern proteins domain identified by eMATRIX, accession number BL01187B, p-value= 6.538e-16, raw score of 12.04
  misc_feature (1)...(337): Xaa = X or * as defined in Table 2
SSAPEAAKKPTPCHRCRGLVDKFNQGMVDTAKKNFGGGNTAWEEKTLSKYESSEIRLLEILEGLCESSDFECNQMLEAQEEHLEAWWLQLKSEYPDLFEWFCVKTLKVCCVPGTYGPDCLACQGGSQRPCSGNGHCSGDGSRQGDGSCRCHMGYQGPLCIDCMDRLLQLRSRNETHSICTACDESCKTCFGPXPTGLRRSCEVGWVLDEGACVDVEKCAAQTPPCSAAQFCKNANGSYTCEEGDSSWVGCPGKGPGNCKQCISGYAREHGQCADVERVPHXPEKTLCEEKTKTCYNTPGSYVCVCPDGFEETRRCLCAAGRRLKPQKGESPTQLPLP

SEQ ID NO: 12497 - protein, 41 aa, Homo sapiens
  misc_feature (1)...(41): Xaa = X or * as defined in Table 2
KMLQLALQSCIKVRTLNSRHLGAGVTAHEEXCPCCHPMIKQ

SEQ ID NO: 12498 - protein, 2757 aa, Homo sapiens
  DOMAIN (36)..(90): Kinesin light chain repeat proteins domain identified by eMATRIX, accession number BL01160B, p-value=3.212e-09, raw score of 19.54
GEFGSEKKTALHEKEETLRLQSAQAQPFHQEEKESLSLQLQKKNHQVQQLKDQVLSLSHEIEECRSELEVLQQRRERENREGANLLSMLKADVNLSHSERGALQDALRRLLGLFGETLRAAVTLRSRIGERVGLCLDDAGAGLALSTAPALEETWSDVALPELDRTLSECAEMSSVAEISSHMRESFLMSPESVRECEQPIRRVFQSLSLAVDGLMEMALDSSRQLEEARQIHSRFEKEFSFKNEETAQVVRKHQELLECLKEESAAKAELALELHKTQGTLEGFKVETADLKEVLAGKEDSEHRLVLELESLRRQLQQAAQEQAALREECTRLWSRGEATATDAEAREAGFFRVFSGTSLTSCIALSIFALAVLLHLGVRCRCFSDAFSACPLLSGGSLMCLRAQPAGAGPHPAGGDHLVFHHLEPLDFSQSLRLSGLRADKGVCGLHSVERPALRKEVEDLTKEQSETRKQAEKDRSALLSQMKILESELEEQLSQHRGCAKQAEAVTALEQQVASLDKHLRNQRQFMDVRILNNTFFCITKSCRYSMNFFPDRYEQAAEREHEREEFQQEIQRLEGQLRQAAKPQPWGPRDSQVELLQQKLREKLDEFNELAIQKESADRQVLMQEEEIKRLEEMNINIRKKVAQLQEEVEKQKNIVKGLEQGGPLSITCTWSGVVPLAGHCTHFSDSCSRAASPLLPSLSERLLSLVDARDKEVLKKQQMSSLLLASTLQSTLDAGRCPEPPSGSPPEGPEIQLEVTQRALLRRESEVLDLKEQLEKMKGDLESKNEEILHLNLKLDMQNSQTAVSLRELEEENTSLKVIYTRSSEIEELKATIENLQENQKRLQKEKAEEIEQLHEVIEKLQHELSLMGPVVHEVSDSQAGSLQSELLCSQAGGPRGQALQGELEAALEAKEALSRLLADQERRHSQALEALQQRLQGAEEAAELQLAELERNVALREAEVEDMASRIQEFEAALKAKEATIAERNLEIDALNQRKAAHSAELEAVLLALARIRRALEQQPLAAGAAPPELQWLRAQCARLSRQLQVLHQRFLRCQVELDRRQARRATAHTRVPGAHPQPRMDGGAKAQVTGDVEASHDAALEPVVPDPQGDLQPVLVTLKDAPLCKQEGVMSVLTVCQRQLQSELLLVKNEMRLSLEDGGKGKEKVLEDCQLPKVDLVAQVKQLQEKLNRLLYSMTFQNVDAADTKSLWPMASAHLLESSWSDDSCDGEEPDISPHIDTCDANTATGGVTDVIKNQAIDACDANTTPGGVTDVIKNWDSLIPDEMPDSPIQEKSECQDMSLSSPTSVLGGSRHQSHTAEAGPRKSPVGMLDLSSWSSPEVLRKDWTLEPWPSLPVTPHSGALSLCSADTSLGDRADTSLPQTQGPGLLCSPGVSAAALALQWAESPPADDHHVQRTAVEKDVEDFITTSFDSQETLSSPPPGLEGKADRSEKSDGSGFGARLSPGSGGPEAQTAGPVTPASISGRFQPLPEAMKEKEVRPKHVKFSRSFYGKTIDKNLAKQALLQMVRDESHQILALSEGLAPPSGEPHPPRKEDEIQDISLHGGKTQQALVVCERQPGWHSGGSLVLHAAPGDQREVPTACPDWRGDLLQVVQEAFEKEQEMQGVELQPRLSGSDLGGHSSLLERLEKIIREQGDLQEKSLEHLRLPDRSSLLSEIQALRAQLRMTHLQNQEKLQHLRTALTSAEARGSQQEHQLRRQVLDSVKGNGLAVQPTALVPAPMPFVLSGAGGRRCAHALELLAYKVEQEKCIAGDLQKTLSEEQEKANSVQKLLAAEQTVVRDLKSDLCESRQKSEQLSRSLCEVQQEVLQLRSMLSSKENELKAALQELESEQGKGRALQSQLEEEQLRHLQRESQSAKALEELRASLETQRAQSSRLCVALKHEQTAKDNLQKELRIEHSRCEALLAQERSQLSELQKDLAAEKSRTLELSEALRHERLLTEQLSQRTQEACVHQDTQAHHALLQKLKEEKSRVVDLQAMLEKVQQQALHSQQQLEAEAQKHCEALRREKEVSATLKSTVEALHTQKRELRCSLEREREKPAWLQAELEQSHPRLKEQEGRKAARRSAEARQSPAAAEQWRKWQRDKEKLRELELQRQRDLHKIKQLQQTVRDLESKDEVPGSRLHLGSARRAAGSDADHLREQQRELEAMRQRLLSAARLLTSFTSQAVDRTVNDWTSSNEKAVMSLLHTLEELKSDLSRPTSSQKKMAAELQFQFVDVLLKDNVSLTKALSTVTQEKLELSRAVSKLEKLLKHHLQKGCSPSRSERSAWKPDETAPQSSLRRPDPGRLPPAASEEAHTSNVKMEKLYLHYLRAESFRKALIYQKKYLLLLIGGFQDSEQETLSMIAHLGVFPSKAERKITSRPFTRFRTAVRVVIAILRLRFLVKKWQEVDRKGALAQGKAPRPGGTPAAVDRWTHKPFFLLLFFIHFGSFFSVDGDVIKHVYICGFTGRSLGPVDRRRKNTGLFYQRIHTALNQLPRPSSIAHGSMYILTLGYFFHKKVDDQELCLKFCLLRGYALITIFQEWFLQKQTLRLSLGYEDVDMVSTPVKGRGRKQDWAEEEGYAPRAATKQPARLKPATLKQAQRRACRERRSPASPNGSPERHRRVFGANGSEALVLLGGAGRAARARDPLRTRARYPPFPPRTRSRGRPGAQERAGQRRRGGAIRARARAASARTLAGLAMADRGCPLEAAPLPAEVRESLAELELELSEGWKKKLNSDKDAVFNRNW

SEQ ID NO: 12499 - protein, 3342 aa, Homo sapiens
  DOMAIN (1406)..(1454): Intermediate filaments proteins domain identified by eMATRIX, accession number BL00226B, p-value=9.663e-10, raw score of 23.86
LCVSPVTAGRPARSLREMEVEQEQRRRKVEAGRTKLAHFRQRKTKGDSSHSEKKTAKRKGSAVDASVQEESPVTKEDSALCGGGDICKSTSCDDTPDGAGGAFAAQPEDCDGEKREDLEQLQQKQVNDHPPEQCGMFTVSDHPPEQHGMFTVGDHPPEQRGMFTVSDHPPEQHGMFTVSDHPPEQRGMFTISDHQPEQRGMFTVSDHTPEQRGIFTISDHPAEQRGMFTKECEQECELAITDLESGREDEAGLHQSQAVHGLELEALRLSLSNMHTAQLELTQANLQKEKETALTELREMLNSRRAQELALLQSRQQHELELLREQHAREKEEVVLRCGQEAAELKEKLQSEMEKNAQIVKTLKEDWESEKDLCLENLRKELSAKHQSEMEDLQNQFQKELAEQRAELEKIFQDKNQAERALRNLESHHQAAIEKLREDLQSEHGRCLEDLEFKFKESEKEKQLELENLQASYEDLKAQSQEEIRRLWSQLDSARTSRQELSELHEQLLARTSRVEDLEQLKQREKTQHESELEQLRIYFEKKLRDAEKTYQEDLTLLQQRLQGAREDALLDSVEVGLSCVGLEEKPEKGRKDHVDELEPERHKESLPRFQAELEESHRHQLEALESPLCIQHEGHVSDRCCVETSALGHEWRLEPSEGHSQELPWVHLQGVQDGDLEADTERAARVLGLETEHKVQLSLLQTELKEEIELLKIENRNLFEKLQHETRLKDDLEKVKHNLIEDHQKELNNAKQKTELMKQEFQRKETDWKVMKEELQREAEEKLTLMLLELREKAESEKQTIINKLELREAEMRQLQDQQAAQILDLERSLTEQQARLQQLEQDLTSDDALHCSQCGREPPTAQDGELAALHVKEDCALQLMLARSRFLEERKEIAEKFSAEQDAFLQLLQERHQQQLLSVTAELEARHQAALGELTASLESKQGALLAARVAELQTKHAADLGALETRHLSTLDSLESCYLSEFQTIREEHRQALELLRADFEEQLWKKDSLHQTILTQELEKLKRKHKGELQSVRDHLRTEASTELAGTVAHELQGVHQGEFGSEKKTALHEKEETLRLQSAQAQPFHQEEKESLSLQLQKKNHQVQQLKDQVLSLSHEIEECRSELEVLQQRRERENREGANLLSMLKADVNLSHSERGALQDALRRLLGLFGETLRAAVTLRSRIGERVGLCLDDAGAGLALSTAPALEETWSDVALPELDRTLSECAEMSSVAEISSHMRESFLMSPESVRECEQPIRRVFQSLSLAVDGLMEMALDSSRQLEEARQLHSRFEKEFSFKNEETAQVVRKHQELLECLTEESAAKAELALELHKTQGTLEGFKVETADLKEVLAGKEDSEHRLVLELESLRRQLQQAAQEQAALREECTRLWSRGEATATDAEAREAALRKEVEDLTKEQSETRKQAEKDRSALLSQMKILESELEEQLSQHRGCAKQAEAVTALEQQVASLDKHLRNQRQFMDEQAAEREHEREEFQQEIQRLEGQLRQAAKPQPWGPRDSQQAPLDGEVELLQHKLREKLDEFNELAIQKESADRQVLMQEEEIKRLEEMNINIRKKVAQLQEEVEKQKNIVKGLEQDKEVLKKQQMSSLLLASTLQSTLDAGRCPEPPSGSPPEGPEIQLEVTQRALLRRESEVLDLKEQLEKMKGDLESKNEEILHLNLKLDMQNSQTAVSLRELEEENTSLKVIYTRSSEIEELKATIENLQENQKRLQKEKAEEIEQLHEVIEKLQHELSLMGPVVHEVSDSQAGSLQSELLCSQAGGPRGQALQGELEAALEAKEALSRLLADQERRHSQALEALQQRLQGAEEAAELQLAELERNVALREAEVEDMASRIQEFEAALKAKEATIAERNLEIDALNQRKAAHSAELEAVLLALARIRRALEQQPLAAGAAPPELQWLRAQCARLSRQLQVLHQRFLRCQVELDRRQARRATAHTRVPGAHPQPRMDGGAKAQVTGDVEASHDAALEPVVPDPQGDLQPVLVTLKDAPLCKQEGVMSVLTVCQRQLQSELLLVKNEMRLSLEDGGKGKEKVLEDCQLPKVDLVAQVKQLQEKLNRLLYSMTFQNVDAADTKSLWPMASAHLLESSWSDDSCDGEEPDISPHIDTCDANTATGGVTDVIKNQAIDACDANTTPGGVTDVIKNWDSLIPDEMPDSPIQEKSECQDRSLSSPTSVLGGSRHQSHTAEAGPRKSPVGMLDLSSWSSPEVLRKDWTLEPWPSLPVTPHSGALSLCSADTSLGDRADTSLPQTQGPGLLCSPGVSAAALALQWAESPPADDHHVQRTAVEKDVEDFITTSFDSQETLSSPPPGLEGKADRSEKSDGSGFGARLSPGSGGPEAQTAGPVTPASISGRFQPLPEAMKEKEVRPKHVKALLQMVRDESHQILALSEGLAPPSGEPHPPRKEDEIQDISLHGGKTQEVPTACPDWRGDLLQVVQEAFEKEQEMQGVELQPRLSGSDLGGHSSLLERLEKIIREQGDLQEKSLEHLRLPDRSSLLSEIQALRAQLRMTHLQNQEKLQHLRTALTSTEARGSQQEHQLRRQVELLAYKVEQEKCIAGDLQKTLSEEQEKANSVQKLLAAEQTVVRDLKSDLCESRQKSEQLSRSLCEVQQEVLQLRSMLSSKENELKAALQELESEQGKGRALQSQLEEEQLRHLQRESQSAKALEELRASLETQRAQSSRLCVALKHEQTAKDNLQKELRIEHSRCEALLAQERSQLSELQKDLAAEKSRTLELSEALRHERLLTEQLSQRTQEACVHQDTQAHHALLQKLKEEKSRVVDLQAMLEKVQQQALHSQQQLEAEAQKHCEALRREKEVSATLKSTVEALHTQKRELRCSLEREREKPAWLQAELEQSHPRLKEQEGRKAARRSAEARQSPAAAEQWRKWQRDKEKLRELELQRQRDLHKIKQLQQTVRDLESKDEVPGSRLHLGSARRAAGSDADHLREQQRELEAMRQRLLSAARLLTSFTSQAVDRTVNDWTSSNEKAVMSLLHTLEELKSDLSRPTSSQKKMAAELQFQFVDVLLKDNVSLTKALSTVTQEKLELSRAVSKLEKLLKHHLQKGCSPSRSERSAWKPDETAPQSSLRRPDPGRLPPAASEEAHTSNVKMEKLSLHYLRAESFRKALIYQKKYLLLLIGGFQDSEQETLSMIAHLGVFPSKAERKITSRPFTRFRTAVRVVIAILRLRFLVKKWQEVDRKGALAQGKAPRPGPRARQPQSPPRTRESPPTRDVPSGHTRDPARGRRLAAAASPHSGGRATPSPNSRLERSLTASQDPGHSLTEYIHHLEVIQQRLGGVLPDSTSKKSCRPMIKQ

SEQ ID NO: 12500 - protein, 1736 aa, Homo sapiens
  misc_feature (1)...(1736): Xaa = X or * as defined in Table 2
APLDGEVELLQQKLREKLDEFNELAIQKESADRQVLMQEEEIKRLEEMNINIRKKVAQLQEEVEKQKNIVKGLEQDKEVLKKQQMSSLLLASTLQSTLDAGRCPEPPSGSPPEGPEIQLEVTQRALLRRESEVLDLKEQLEKMKGDLESKNEEILHLNLKLDMQNSQTAVSLRELEEENTSLKVIYTRSSEIEELKATIENLQENQKRLQKEKAEEIEQLHEVIEKLQHELSLMGPVVHEVSDSQAGSLQSELLCSQAGGPRGQALQGELEAALEAKEALSRLLADQERRHSQALEALQQRLQGAEEAAELQLAELERNVALREAEVEDMASRIQEFEAALKAKEATIAERNLEIDALNQRKAAHSAELEAVLLALARIRRALEQQPLAAGAAPPELQWLRAQCARLSRQLQVLHQRFLRCQVELDRRQARRATAHTRVPGAHPQPRMDGGAKAQVTGDVEASHDAALEPVVPDPQGDLQPVLVTLKDAPLCKQEGVMSVLTVCQRQLQSELLLVKNEMRLSLEDGGKGKEKVLEDCQLPKVDLVAQVKQLQEKLNRLLYSMTFQNVDAADTKSLWPMASAHLLESSWSDDSCDGEEPDISPHIDTCDANTATGGVTDVIKNQAIDACDANTTPGGVTDVIKNWDSLIPDEMPDSPIQEKSECQDMSLSSPTSVLGGSRHQSHTAEAGPRKSPVGMLDLSSWSSPEVLRKDWTLEPWPSLPVTPHSGALSLCSADTSLGDRADTSLPQTQGPGLLCSPGVSAAALALQWAESPPADDHHVQRTAVEKDVEDFITTSFDSQETLSSPPPGLEGKADRSEKSDGSGFGARLSPGSGGPEAQTAGPVTPASISGRFQPLPEAMKEKEVRPKHVKALLQMVRDESHQILALSEGLAPPSGEPHPPRKEDEIQDISLHGGKTQEVPTACPDWRGDLLQVVQEAFEKEQEMQGVELQPRLSGSDLGGHSSLLERLEKIIREQGDLQEKSLEHLRLPDRSSLLSEIQALRAQLRMTHLLNXEKLQHLRTGLRSAEARGSHHEHQLRRQVELVAYKVEQEKCIAGDLQKTLSEEQEKANSVQKLLAAEQTVVRDLKSDLCESRQKSEQLSRSLCEVQQEVLQLRSMLSSKENELKAALQELESEQGKGRALQSQLEEEQLRHLQRESQSAKALEELRASLETQRAQSSRLCVALKHEQTAKDNLQKELRIEHSRCEALLAQERSQLSELQKDLAAEKSRTLELSEALRHERLLTEQLSQRTQEACVHQDTQAHHALLQKLKEEKSRVVDLQAMLEKVQQQALHSQQQLEAEAQKHCEALRREKERELELQRQRDLHKIKQLQQTVRDLESKDEVPGSRLHLGSARRAAGSDADHLREQQRELEAMRQRLLSAARLLTSFTSQAVDRTVNDWTSSNEKAVMSLLHTLEELESDLSRPTSSQKKMAAELQFQFVDVLLKDNVSLTKALSTVTQEKLELSRAVSKLEKLLKHHLQKGCSPSRSERSAWKPDETAPQSSLRRPDPGRLPPAASEEAHTSNVKMEKLYLHYLRAESFRKALIYQKKYLLLLIGGFQDSEQETLSMIAHLGVFPSKAERKITSRPFTRFRTAVRVVIAILRLRFLVKKWQEVDRKGALAQGKAPRPGPRARQPQSPPRTRESPPTRDVPSGHTRDPARRRRLAAAASPHSGGRATPSPNSRLERSLTASQDPEHSLTEYIHHLERVPPKNCEGAYPHSTSKKSCHPMIKQ

SEQ ID NO: 12501 - protein, 35 aa, Homo sapiens
  misc_feature (1)...(35): Xaa = X or * as defined in Table 2
XSSSDGNLRPEAITAIIVVFSLLAALLLAVGLALL

SEQ ID NO: 12502 - protein, 156 aa, Homo sapiens
  misc_feature (1)...(156): Xaa = X or * as defined in Table 2
STFFPAIKHWVDLTAQRGHCLSPRSHSNEGRQMQERGPRWAGSPAPSPWSPEGPGPRLHGRTERKERGLWGLLDTQRKVGSASRGVGPEPQHTXAAGTAKQRQHAAQSPPHGCPQPLPTSPPEPSEAGVSVAAAVYKPATRSPGQCWWLQQAPAFR

SEQ ID NO: 12503 - protein, 237 aa, Homo sapiens
  misc_feature (1)...(237): Xaa = X or * as defined in Table 2
TDRGCRGRDTFHEPELGPKTPGPGAPLQVPLAGDAVGGASARSPFLGAGNPPPIPWRTPAGAASGAGPAAPAGPLGPSLGRKYRPLLRMRIALFCLHPPAPAPMATCVHKPSLLSSRSSTSSAALLLAVGAGTVGAERFGRSGRRRAPTGPVARSSSPMQPRPGPLRTPRRRCRAACPSRSPLLHLSPFIAVXPWGKAVPSLGSQIHPVLNSREEGTSKTLPLRSREDGAIHFYIFI

SEQ ID NO: 12504 - protein, 268 aa, Homo sapiens
  misc_feature (1)...(268): Xaa = X or * as defined in Table 2
RPQGFPAWRLPSRRGATPGRLPRSXPRPHPRPEPGVRVGPWVIIESVRHQDCSGRSPGQTPTCEDRAPSGKGSALGRGSLGPWTLIGSGRGRSPGKLGPSPGPAKAFXRRRRASKVAPGPLDGWPRIAQAWARKGKHLAWGTGGSWPPSHAPGHQLGFQLKQPLGNQREWGQNLGIQDLXGQVDPNRPPPLSGPGDRHLTGKPSGREGALSQGPQGRHSPGRPQQQASSSCCERSHPGLPPVTTHCPGVQWASCPGWGCLARCSPRPA

SEQ ID NO: 12505 - protein, 70 aa, Homo sapiens
  DOMAIN (28)..(69): kw TRANSCRIPTASE REVERSE II ORF2 domain identified by eMATRIX, accession number DM01354I, p-value=9.571e-23, raw score of 15.55
VFCYSRTNWNKTEINRKKFGKLPSIWKLSSTLLNNQLVSEENKREIKKYPDINENEDTTYQNLWNELKQC

SEQ ID NO: 12506 - protein, 137 aa, Homo sapiens
  misc_feature (1)...(137): Xaa = X or * as defined in Table 2
FFFFLRWSLNSVSQAGVQWWDLSLLQPLLPGFKQFSCLSLLSSWDYGCPPRPANFLHFXXRQGFTMLFRLVSNSXPHDSPISASQSAGIIGVSHRARPSCLLLAYFSEFVSKWKQSSTKALPCGFRMLCPVLTPVEK

SEQ ID NO: 12507 - protein, 294 aa, Homo sapiens
YLSIHQVYGKEACIPCGPGSKNNQDHSVCYSDCFFYHEKENQSLHYDFSNLSSVGSLMNGPSFTSKGTKYFHFFNISLCGHEGKKMALCTNNITDFNVKEIVAGSDDYTNLVGAFVCQSTIIPSESTGVSEQPYHHNPIILADTFIGVTVETTLKNINIKEDMFPVPTSQIPDVHFFYKSSTATTSCINGRSTAVKMRCNPTKSGAGVISVPIKCPAGTCDGCTFYFLWESAEACPLCTEHDFHEIEGACKRGFQETLYVWNEPKWCIKGISLPEKKLATCETVDFWLKVGAGV

SEQ ID NO: 12508 - protein, 898 aa, Homo sapiens
  DOMAIN (333)..(348): CALCIUM-BINDING PRECURSOR SIGNAL R domain identified by eMATRIX, accession number PD00919B, p-value=4.822e-09, raw score of 9.47
  misc_feature (1)...(898): Xaa = X or * as defined in Table 2
CSVKECLQASAKLPSAPASVSLLCLLVAKVWRRLRWQEAAFSCASGEYLEMKNQVCSKCGEGTYSLGSGIKFDEWDELPAGFSNIATFMDTVVGPSDSRPDGCNNSSWIPRGNYIESNRDDCTVSLIYAVHLKKSGYVFFEYQYVDNNIFFEFFIQNDQCQEMDTTTDKWVKLTDNGEWGSHSVMLKSGTNILYWRTTGILMGSKAVKPVLVKNITIEGVAYTSECFPCKPGTFSNKPGSFNCQSCKIIDPFLKRFFYVAEEGSSECTERPPCTTKDYFQIHTPCDEEGKTQIMYKWIEPKICREDLTDAIRLPPSGEKKDCPPCNPGFYNNGSSSCHPCPPGTFSDGTKECRPCPAGTEPALGFEYKWWNVLPGNMKTSCFNVGNSKCDGMNGWEVAGDHIQSGAGGSDNDYLILNLHIPGFKPPTSMTGATGSELGRITFVFETLCSADCVLYFMVDINRKSTNVVESWGGTKEKQAYTHIIFKNATFTFTWAFPENXFRVQDNRRFINDMVKIYSITATNAVDGVASSCRACALGSEQSGSSCVPCPPGHYIEKETNQCKECPPDTYLSIHQVYGKEACIPCGPGSKNNQGKKMALCTNNITDFTVKEIVAGSDDYTNLVGAFVCQSTIIPSESKGFRAALSSQSIILADTFIGVTVETTLKNINIKEDMFPVPTSQIPDVHFFYKTIYRQIIDIKCPAGTCDGCTFYFLWESAEACPLCTEHDFHEIEGACKRGFQETLYVWNEPKWCIKGISLPEKKLATCETVDFWLKVGAGVGAFTAVLLVALTCYFWKKNQKLEYKYSKLVMTTNSKECELPAADSCAIMEGEDNEEEVVYSNKQSLLGKLKSLATKTAIGVFGGPWSLGYVISCQYSETRSSCIISVHAKNEILAIEEE

SEQ ID NO: 12509 - protein, 377 aa, Homo sapiens
  DOMAIN (282)..(310): 303 kw ACTIVATING RAN GTPASE ISOZYME domain identified by eMATRIX, accession number DM01269A, p-value=7.785e-09, raw score of 23.35
  misc_feature (1)...(377): Xaa = X or * as defined in Table 2
NFDSKRRITVRNLRIREDIAKYLRNLDPNSAHYDPKTRAMRENPYANAGKNPDEVSYAGDNFVRYTGDTISMAQTQLSVSSMSSHFISAHKTFGIVXSLFSRSIQXCSCQLTKMFRITLVFAWEAYDKGSEVHLQADPTKLELLYKSFKVKKEDFKEQQKESILEKYGGQEHLDAPPAELLLAQTEDYVEYSRHGTVIKGQERAVACSKYEEDVKIHNHTHIWGSYWKEGRRGNKCCHSFFKYSYCTGEAGKEIVNSEECIINEITGEESVKKPQTLMELHQEKLKEEKKKKKKKKKKHRKSSSDSDDEKMGHVKSNKALNAXEARLLHVKETMQIDERKRPYNSMYXTSRPIEEEMEAYRMKRQRPDDPMASFLGQ

SEQ ID NO: 12510 - protein, 528 aa, Homo sapiens
  DOMAIN (43)..(59): MEMBRANE ALANYL DIPEPTIDASE (M1) FAMILY SIGNATURE domain identified by eMATRIX, accession number PR00756A, p-value=1.545e- 14, raw score of 12.90
  DOMAIN (36)..(286): Peptidase family M1 domain identified by PFam, accession name Peptidase_M1, E-value=4.2e-55, PFam score of 160.1
  misc_feature (1)...(528): Xaa = X or * as defined in Table 2
APALKVILRYTXTDAPAIWWLDPELTYGCAKPFVFTQGHSVCNRSFFPCFDTPAAKCTYSAVVKAPSGVQELMSATRSAYMEEEGVFHFHMEHPVPAYLVALVAGDLKPGDIGPTSRVWAEPCLLPTATSKLSGAVEQWLSAAERLYGPYMWGRYDIVFLPPSFPIVAMENPCLTFIISSILESDEFLVIDVIHEVAHSWFGNAVTNATWEEMWLSEGLATYAQRRITTETYGAAFTCLETAFRLDALHRQMKLLGEDSPVSKLQVKLEPGVNPSHLRNLFTYEKGYCFVYYLSQLCGDPQRFDDFLRAYVGEYKFTSVVAQDLLDSFLSFFPELKEQSVDCRAGLEFERWLNATGPPLAEPDLSQGSSLTRPVEGLFQLWTAEPLDQAAASASAIDISKWRTFQTALFLDRLLDGSPLPQEVVMSLSKCYSSLLDSMNAEIRIRWLQIVVRNDYYSLTFHRVRRFPGRARCHACYTIPLYEDLCTGALKSFALEVFYQTQGRLHPNLRRAIQQILSQGLGFQHRARP

SEQ ID NO: 12511 - protein, 137 aa, Homo sapiens
  DOMAIN (114)..(130): Phorbol esters / diacylglycerol binding domain proteins domain identified by eMATRIX, accession number BL00479B, p-value= 6.304e-09, raw score of 12.57
  misc_feature (1)...(137): Xaa = X or * as defined in Table 2
FMGGVNRADENIDKYRASIRGKKWYSSPLLFCFELVLQNAWQLHKTYDEKPVDFLEFRRRVVCHYLETHGHPPEPGQKGRPQKRNIDSRYEGPXIQVDSPNQGKQTRCAECHKNTTFRCEKCDVALHVKCSVEYHTE

SEQ ID NO: 12512 - protein, 68 aa, Homo sapiens
  misc_feature (1)...(68): Xaa = X or * as defined in Table 2
KKFSCGLKKIFHEKNCQSTXQISLLSYFKKLQQPPQLSSTTLSQQPSTLRQNPPPAKRLXLIEGSADG

SEQ ID NO: 12513 - protein, 129 aa, Homo sapiens
  misc_feature (1)...(129): Xaa = X or * as defined in Table 2
CRFNAISSKITADFTVFGGFLLEVHKVILKCKWKYYKSRIVKTGFKKTQLSGLILHNNKTXYTSIIIKTELTKYRHRMENPEIDLHRFDQMIFDEGIKVIQXGKERLFNQWCWSRLRCICLKFSITNGQ

SEQ ID NO: 12514 - protein, 100 aa, Homo sapiens
  misc_feature (1)...(100): Xaa = X or * as defined in Table 2
TFPNLMTNMNLQIQEAQXIPSWKNSERSQSRHLIIKLLKIKGKERILKEQKLITYKGCSIRLRGDFSPETTEARKXWDDIFKVLKEQVSTKNLIFSKTVL

SEQ ID NO: 12515 - protein, 98 aa, Homo sapiens
  DOMAIN (81)..(98): P450 SUPERFAMILY SIGNATURE domain identified by eMATRIX, accession number PR00385A, p-value=5.696e-13, raw score of 14.97
  DOMAIN (39)..(98): Cytochrome P450 domain identified by PFam, accession name p450, E-value=8.6e-11, PFam score of 41.0
CSKGMPCSSKRNFCRQTMPSFIHEDDKNGRLIEKASVNRKPQLPQHFVDAYLDEMDQGKNDPSSTFSKENLIFSVGELIIAGTETTTNVLRWAILFMA

SEQ ID NO: 12516 - protein, 303 aa, Homo sapiens
SSCLKILNIITLAKSLLLCLDISVCYYLLDTGICYCLLDISVCYCLLDISICYCLLDTSVCYCLLDISVCYCLLNISICYYLLDTGICYCLLDISVCYCLLDISVCYCLLDISVCYCLLDISVCYYLLDISVCYCLLDISVCCCLLDISVCYCLLDISVCYYLLDISICYCLLDISVCYCLLDISVCYCLLDISICYCLLDISVCYCLLDISVCNCLLDISFCYYLLDISVCYCLLDISVCYCLLGISVCYYLLDISVCYCLLDISVCYCLLDISVCYYLLDNSVCYCLLDISICCCLLDISH

SEQ ID NO: 12517 - protein, 86 aa, Homo sapiens
  DOMAIN (41)..(60): E-CLASS P450 GROUP I SIGNATURE domain identified by eMATRIX, accession number PR00463F, p-value=7.568e-12, raw score of 17.63
  DOMAIN (14)..(86): Cytochrome P450 domain identified by PFam, accession name p450, E-value=1.2e-26, PFam score of 97.0
ELHNNLNTFSLTGQVQKEIDLLMGPNGKPSWDDKCKMPYTEAVLHEVLRFCNIVPLGIFHATSEDAVVRGYSIPKGTTVITNLYSV

SEQ ID NO: 12518 - protein, 446 aa, Homo sapiens
  DOMAIN (248)..(275): E-CLASS P450 GROUP I SIGNATURE domain identified by eMATRIX, accession number PR00463E, p-value=6.595e-17, raw score of 17.37
  DOMAIN (1)..(446): Cytochrome P450 domain identified by PFam, accession name p450, E-value=7.4e-41, PFam score of 147.2
  misc_feature (1)...(446): Xaa = X or * as defined in Table 2
SLDLGGISTVVVNGYDVVKECLVHQSEIFADRPCLPLFMKMTKMGGLLKSRYGRGWVDHRRLAVNSFRYFGYGQKSFESKILEKETKFFNGCYWKHTKVGPFDFXTVXXRMLFSNITNLIHFWEERFHFMQGHRFFRHMDWSYFRWKMWNXAASASVFLYNAFPWIWAFLPFGKHQQLFRKWTAVVYDFLSRLIEKASVNRKPQLPQHFVDAYLDEMDQGKNDPSSTFSKENLIFSVGELIIAGTETTTNVLRWAILFMALYPNIQGQVQKEIDLIMGPNGKPSLGRRNAKCPYTEAVLHEVLRFGNIVPLGIFHATSEDASLRGYSIPKGTTIITKPXFLYHLGWKKVPGEDPQKVFPIPERFPGTSSGIFWPQEGKLWVPFFPLGRRHCPWENTLARMEMVLFFSSIASEVSFAFSHMNXFQIXSPRLGMTLQPQPYLICAERR

SEQ ID NO: 12519 - protein, 45 aa, Homo sapiens
SPLVLVSHFHLHDITRRWWGAWFPALPPPSPSSPVCLPYPHFPNL

SEQ ID NO: 12520 - protein, 114 aa, Homo sapiens
  DOMAIN (74)..(110): PTN/MK heparin-binding protein family proteins domain identified by eMATRIX, accession number BL00619A, p-value=8.624e- 09, raw score of 19.07
  misc_feature (1)...(114): Xaa = X or * as defined in Table 2
LNTLPEVPFTPLSCLPSLSLSSXLAPSPFICICYAIVPPPFLLLPSDLADPSSHPGLPFLFPPHSPRHAPSAPPSKKKKKKKKKKKKTTAPVQASLGTSSLYPLGGSETGPTWS

SEQ ID NO: 12521 - protein, 236 aa, Homo sapiens
  DOMAIN (85)..(104): Eukaryotic  RNA-binding region RNP-1 proteins domain identified by eMATRIX, accession number BL00030A, p-value=1.000e- 08, raw score of 14.39
  misc_feature (1)...(236): Xaa = X or * as defined in Table 2
GRRGRGRAGSRAGRRGGAQAAALVNRGGGPIRNYSDVAGGAAGGGGRNRPAPYSRPKQLPDKWQHDLFDSGFGGGAAGVETGGKLLVSNLDFGVSDADIQELFAEFGERXRRAAVHYDRSGRSLGTADVHFERKADALKAMKQYNGVPLDGRPMNIQLVTSQIDAQRRPAQSVNRGGMTRNRGAGGFGGWVDGTRKGTRGGARGRGRGAGRNSKQQLSAEELDAQLDAYNARMDTS

SEQ ID NO: 12522 - protein, 99 aa, Homo sapiens
  misc_feature (1)...(99): Xaa = X or * as defined in Table 2
GLLCQASGPQAPGWPAGLGRRGQGSPNLPVPPRPVPAXAPGHTCHALGKIPFXVPLPLQXGPPETHLREPPPGPCPPSPVPSPYQGFLQPGGRAGGDRD

SEQ ID NO: 12523 - protein, 127 aa, Homo sapiens
  misc_feature (1)...(127): Xaa = X or * as defined in Table 2
FFFFFFFFETETCSVAXAGVQWRDLDXLQPPPPGFKRFLCLSRPSSWDYRCTSPYLAHFXFLVETGFHHVGQAGLELLTSSDPPISASQSAGITGVSHCTWPKLTTSTLMNVFPLNIILLYLVILAK

SEQ ID NO: 12524 - protein, 111 aa, Homo sapiens
  misc_feature (1)...(111): Xaa = X or * as defined in Table 2
PTHPWPPTVLEATAPGSEYFFFXDAVLLSSRRLECSGSISAHCDLHLPSSSDSPSSVPQVAWIIGVRHHVQLIFVFLVEMGFRHVDQAGLKIAXPQVIHPPRPHKVLGLQV

SEQ ID NO: 12525 - protein, 180 aa, Homo sapiens
  misc_feature (1)...(180): Xaa = X or * as defined in Table 2
TCLGFFQMFFLGSLIFVCYILLKFDCVFIFSSNLGSLIFVCYILLKFDCVFIFSSQLPFFTFYMDYSNPLGLSMSSLRISXKTFXMYGXVLYFFFXKRNSQCFPPFNRDYFWIVCSSSVDLFCTLFFTSCPHQQPSCSPPPPGNKGPAPLPTVTLEALKMMMVFFIGLSSRIRGRSWKSP

SEQ ID NO: 12526 - protein, 144 aa, Homo sapiens
  misc_feature (1)...(144): Xaa = X or * as defined in Table 2
GYFPCFIFPVATSXQSIGVVNFXLFEYFVYIYIFEGFWGGLICLKVSSVCLFQVYFSFAKIIEPPGFKTTLPPSTLVNNWELTSLHQPKRPANFVIFGKRQGFSHVGPGLNSGPHAIRPASASQSTGITGVSHCACALNFITEP

SEQ ID NO: 12527 - protein, 70 aa, Homo sapiens
  DOMAIN (26)..(68): Ribosomal protein L30e proteins domain identified by eMATRIX, accession number BL00709B, p-value=4.079e-15, raw score of 21.58
IRQRKAKLVVLAFNRRGLRKPDIFYYAGVGKIVKKKYSGFFIELVTTCGKNYLMCALAVIDPRDSNIIRS

SEQ ID NO: 12528 - protein, 79 aa, Homo sapiens
  misc_feature (1)...(79): Xaa = X or * as defined in Table 2
GFKQFSCLSHPSSWDYRCAPPHPTNFXFLVEPGFHHVGQAGLELPTSGDLPALASQSAGITGVSHHPWPMSALNSKNVR

SEQ ID NO: 12529 - protein, 109 aa, Homo sapiens
  misc_feature (1)...(109): Xaa = X or * as defined in Table 2
SPETGSCSGAQAGVQWHDLGSLQPXLGLKXSSYLSLLSNWDYRCAPPRLANFLFFVQAGSCHLAQAGLELLSSCHLPALVSQNAGITGVSHHARAGSCMEENTSLWLTL

SEQ ID NO: 12530 - protein, 161 aa, Homo sapiens
  misc_feature (1)...(161): Xaa = X or * as defined in Table 2
RGTEGRRVKSSKAGFFCFVLFCFVLRWSLTLLAQAGVQRHDLSSLQPPPPTFKXFSCLSLPSSWDYRRPPPRSGXFSFVFLVETGFHQVGQAGLELLTSGDPPASASQSAGITGVSHHAQPQLDLEPPVCGQRDMALLLLERLPETVTCFLFPSELCRRAR

SEQ ID NO: 12531 - protein, 100 aa, Homo sapiens
  misc_feature (1)...(100): Xaa = X or * as defined in Table 2
FFEMESCSAAQAGVQWHNPSSLQPPLPGFKQFSCLSLPSSWDYRRAPPHPANFEFLVDARFYHVGQAGLELLTSSDLLASASXSAGITGMSHHGWPXATF

SEQ ID NO: 12532 - protein, 91 aa, Homo sapiens
  misc_feature (1)...(91): Xaa = X or * as defined in Table 2
IRITEGGAQASVVFKTPQVWLGTVAHTCSPSTLRSRGGWITXVQEFKTSQSNRNQRGCNLVWSLKLTSILLTFELDSIRQEEGKLVRRWGR

SEQ ID NO: 12533 - protein, 95 aa, Homo sapiens
  misc_feature (1)...(95): Xaa = X or * as defined in Table 2
GRVGNNKKFGGRISLCQPGWSAVTQLQLIVTLNSWAERFSQLDLPSSXDYRCTCLANFLTFCKDECLAMLLRLVLNSWPQGIPLPQLLKVLELQV

SEQ ID NO: 12534 - protein, 117 aa, Homo sapiens
  misc_feature (1)...(117): Xaa = X or * as defined in Table 2
ILKHYPSQISSILQRKHTRQLSASLITNAKVFFQASRFNVSSHILALLQENIFYFNTKPVICKPGCVIRITFXKLXIASQVRWLTPVIPALWEAEAGRSRGQGIKTILANTVKPRLY

SEQ ID NO: 12535 - protein, 68 aa, Homo sapiens
  DOMAIN (14)..(34): kw TRANSCRIPTASE REVERSE II ORF2 domain identified by eMATRIX, accession number DM01354W, p-value=1.545e-09, raw score of 12.64
  misc_feature (1)...(68): Xaa = X or * as defined in Table 2
EDVNRWRDIPSPWIGRVRIVRMSVLPNPINNTYINTEFLILIXYXYRNTSIPIKISGRFFVLLRENEN

SEQ ID NO: 12536 - protein, 91 aa, Homo sapiens
  misc_feature (1)...(91): Xaa = X or * as defined in Table 2
ISIFCFFKTDSSCVAQAGVQXXNLGSLQPCNLQPLPPGFKXFSCLSLLSNWDYRCAPPHPNFCIFSRDGISPXLSILPTTPFIKVARKILI

SEQ ID NO: 12537 - protein, 466 aa, Homo sapiens
  misc_feature (1)...(466): Xaa = X or * as defined in Table 2
RETRSCWAHYHAESSKHQKAKLKDSRKARRSIELIGPGSSQKGGDICSLIHLSSKLGILCYSKTGNMGGWEGGMQLRVSSENSMGKSSRERAAADLPQGSCWHELPGRLINTRISLKPRHVWNLSSVLCQVVKKVKSMQMFHMPITSAMQGDRLGICVTQFDPKLLERGLVCAPESLHTVHAALISVEKIPYFRGPLQTKAKFHITVGHETVMGRLMFFSPAPDNFDQEPILDSFNFSQEYLFQEQYLSKDLTPAVTDNDEADKKAGQATEGHCPRQQWALVEFEKPVYLPSAVPGDWLQARCGHSPNTCRLAFHGQSCSTGXRTGTNADSFLPRLKVYKLKHKHGLVERAMDDYSVIGRSLFKKETNIQLFVGLKVHLSTGELGIIDSAFGQSGKFKIHIPGGLSPESKKDPDTPPSKTGPGWPVGGQPGRRRSPSGANPHKMGWLTRPFKRYVFDTHKRMVQSP

SEQ ID NO: 12538 - protein, 65 aa, Homo sapiens
IILGNLTACSFYTSSLNAVWLIKSAMLQLYFIFFFGDRPSLCHPGWSAVVQSLLTATSTSWAQAE

SEQ ID NO: 12539 - protein, 140 aa, Homo sapiens
  misc_feature (1)...(140): Xaa = X or * as defined in Table 2
FFFWXGTESQLLPQCSGAITAHCSLXLPGSSEPPTSASXVPETIGTYRHAWLFFFFNLFFVETGSHYVAQAGFEPLGSNDPPPQPPKLLGITGMRHHSRPELLPLTVPMSWESQDGETEDFCAMETWKVNITCLAQTPRL

SEQ ID NO: 12540 - protein, 130 aa, Homo sapiens
  misc_feature (1)...(130): Xaa = X or * as defined in Table 2
LFRTSLLVIAFLPKKNFFFXHYAXSYNVHPNTARKIKPEFRAVRVSFLLSERMSNIFFFFFDTEFHSVTRLECTGTXSSTHCDPRLPGFEQILPASASQSSWDSPACATHARLIFVFLVETGFLHVGQAG

SEQ ID NO: 12541 - protein, 195 aa, Homo sapiens
  misc_feature (1)...(195): Xaa = X or * as defined in Table 2
LLLIPSAVTSYPPKDLPWGGMILSKPPLLGSMLANNCIVAGGCSXSSTLPSXLSSWRVGPQHLPRHARPPHQQVQYIISQDGVQHLLPQEYVVVPEGHHIQGQKGRITHIQYEQGAPFLQESQIQYVPVSPGQQLVTQAQLEAAAHSAVTAVADAAMAQAPGPVWLQDEDKCPKHNSNKLQHPRASKYDVITPGR

SEQ ID NO: 12542 - protein, 135 aa, Homo sapiens
YAPSDLPVKAERSTYNYSLPITVKKTSSQLVTMHDLKQGLGPSGTSGARKPASSKYKLKVSLQTLRVRTRVQSPRAVCVGDIWRRGGDKSQGSLAPAAACGCPSRALWEPGPPLSHVTTPGMIGIGHTQEDRARA

SEQ ID NO: 12543 - protein, 85 aa, Homo sapiens
DDASGEGARNDSFAERLRRGLWEYFVGRTLAGPARRTGMAAEAADLGLGAAVPVELRRERRMVCVEYPGVVRDVAKMLPTLGGEE

SEQ ID NO: 12544 - protein, 390 aa, Homo sapiens
  misc_feature (1)...(390): Xaa = X or * as defined in Table 2
LILNKKSRTRRSFFRRHGPSHGPFAPWRPSRLAEPGELGXREREGYNNPPISGENLIGLSRARRPHNAIFVNFEDEEVPKQPLEAAAQTWRRVCTNPVDRKVEEELRKASPALRLAPLFDIRPIWSRNAVKANITVHPNRFKAWLPFIAYYMITGPWRSLWIRFGYDPRKNPDAKDLYQVLDFRIRCGMKQGYAPSDLPVKAKRSTYNYSLPITVKKTSSQLVTMHDLEAWPWPRRGRSGARKPASSKYKLKVSLQTLRDSVYIFREGALPPYRQMFYQLCDLNVEELQKIIHRNDGAEDFLAQERGWGGCLPQGPGDEFRGDTMSPMIRETIGSKRPALFSSSAKADGGKEQLTYESGEDEEDEVEEEEEEEDFKPSDGSENEMGNQNF

SEQ ID NO: 12545 - protein, 66 aa, Homo sapiens
  misc_feature (1)...(66): Xaa = X or * as defined in Table 2
MSTIKAPXXXXXXXXXXXXXXXXXXXXXXXXXXXXLSSLRIILFQNIYLYWDKITFLYCEHTVGAQ

SEQ ID NO: 12546 - protein, 43 aa, Homo sapiens
  misc_feature (1)...(43): Xaa = X or * as defined in Table 2
MLVARMNXXXXXXXXXXXXXXXXXXXXXXXXXXXXXXXXXXXX

SEQ ID NO: 12547 - protein, 5 aa, Homo sapiens
MGVGD

SEQ ID NO: 12548 - protein, 109 aa, Homo sapiens
  misc_feature (1)...(109): Xaa = X or * as defined in Table 2
QFLHRLVHDSGEVWMKLVEXXNTLLAKMVSISWPRDLPASASQSAGITGLIGALVLSVGIYAEVERHEIXNPXKCLPGSSHHPHPPGRRHVHGLLHWCAGVPPXQPGKH

SEQ ID NO: 12549 - protein, 40 aa, Homo sapiens; identical to SEQ ID NO: 11984

SEQ ID NO: 12550 - protein, 121 aa, Homo sapiens
  misc_feature (1)...(121): Xaa = X or * as defined in Table 2
FFFFFLRRSLSSVPQAGVQXHDLSSLQPPPPGFTPFSCLSLPSSWDYRCPPPRPAKFFLYFXXRRGFTMLARMVSISXPRDPPASASQSAGITGVSHRARPPPPQFFIQLPLYNIHTLEGR

SEQ ID NO: 12551 - protein, 152 aa, Homo sapiens
  misc_feature (1)...(152): Xaa = X or * as defined in Table 2
NPPTSASXVAGTTGACYHTRLILVCRDRVSPCCPVLVFFFFFXDRVAQAGVQWHGLGSTCQPSCPPGFKRFLLPSDSPALSPPSSWEYRHPPPRPANFFCIFIVETGFTVLARMVSISXPRHLPALASQSAGITGLSHCARPVDSFLATSIY

SEQ ID NO: 12552 - protein, 116 aa, Homo sapiens
  misc_feature (1)...(116): Xaa = X or * as defined in Table 2
SSRPGSCRRGAVRAAIRYVRLRAVPSGGGEPPSGAPLQPSWKXAFARPGMLRCSPMSQAPSRSAAVLFEPLAEWMLHCAXQDEVRLGGHXGRRGPLLLDRSRAXRESPAEVRPARE

SEQ ID NO: 12553 - protein, 94 aa, Homo sapiens
  misc_feature (1)...(94): Xaa = X or * as defined in Table 2
SVAQVGMHGHSLGSLQPLPPGLKXSSHLNLPSSWDYRHAPPHLANFCIFFVETGFRHASQAGLKSLSSSNWPTLASQSVVITGVSHRAQPCXTF

SEQ ID NO: 12554 - protein, 156 aa, Homo sapiens
  misc_feature (1)...(156): Xaa = X or * as defined in Table 2
VLIFFFFFLKLSLDSVAXAGVQWCNLSSLQPPSPGFKXFSCLSLLSSWDYRCVPPSPANFFIFLVETGFTVLARMVSISXPHDPPTLASQSVGITGMSHCPWTDLIFXXCKRDTLCIPSMSLSXXFKVPKGNLIWKLLGKFGGLPLGIQNAYFWIV

SEQ ID NO: 12555 - protein, 132 aa, Homo sapiens
  misc_feature (1)...(132): Xaa = X or * as defined in Table 2
EMESSSVTQAXVQWHDLALLQPPPPRFNRFSCLSLLSSWDYRCPPLSPANFCIFSRDMGFIVLARLVLNSXPNDLPASASQSAGITSVTHRIWSKIFFRVDNDHYYILFSSMELNVPTIVLCYHPQSSNMYS

SEQ ID NO: 12556 - protein, 56 aa, Homo sapiens
  misc_feature (1)...(56): Xaa = X or * as defined in Table 2
EPMTPQVSMFSILRQPMKTTGMRIAMQEKVTQNTPSSXKIFRFPSYLIGVSLVISI

SEQ ID NO: 12557 - protein, 128 aa, Homo sapiens
  misc_feature (1)...(128): Xaa = X or * as defined in Table 2
MLYSHDPELSXQRVLTALYAVFPPFVPVDFLXIXFPSALVSIGGSRLLPVLSHWFLDLRVFHXFEKAHLXKLCGNPWLSALLSTFKVMXERLVDQXLSMAKTTEXEPMTPQVSMFSCGRVEEFRHHPC

SEQ ID NO: 12558 - protein, 104 aa, Homo sapiens
  misc_feature (1)...(104): Xaa = X or * as defined in Table 2
FFFNFSRQGLCHPSWSAVTQSRLTVASIFRVQGSSHLSLLGSWDARHVPPCLANFXFFCRDRGLVMLPMSVSNSWAQAILPPWLPSIGITGVSHHVWLASLFVF

SEQ ID NO: 12559 - protein, 128 aa, Homo sapiens
  misc_feature (1)...(128): Xaa = X or * as defined in Table 2
RGADTCLGFQVSADLHHLFSFLFCSVAQAGVQWRNLGSLQPPPPGFKLFSCLSLLSSWDYRHAPPRPGXFFVFLVETGFTRVGQAGLXLLTSGDPPASASQTARGLXGMSHLASPIYLDYFKXNFNKP

SEQ ID NO: 12560 - protein, 36 aa, Homo sapiens
DAFFRTPRVPSVTVPVQCVFGARFKNAPPPFSTPQF

SEQ ID NO: 12561 - protein, 101 aa, Homo sapiens
  misc_feature (1)...(101): Xaa = X or * as defined in Table 2
FLRHNLAVTQPGAQWRLLSSLQPLPPELKPSSHFSLPSSWEYRCEPPHPANFXFLVETGFHHVAQAGLEFLASSDPPTSAFLNAGVTGVNHSAWLCFSYLL

SEQ ID NO: 12562 - protein, 122 aa, Homo sapiens
  misc_feature (1)...(122): Xaa = X or * as defined in Table 2
HRGESVWNICRWGTLRXGKIGKMTRAHCLEFIGALIVFSITSPAPFEAEPKWKNDLDXTLTHGRPVSVVLLAKKCDHGKDECRNSSLKMGQIYMEHSFVGXIETSAKENVNFDEASRCLDAK

SEQ ID NO: 12563 - protein, 101 aa, Homo sapiens
  misc_feature (1)...(101): Xaa = X or * as defined in Table 2
GQALQWCVSVSMCSCIHSHPCVXVLWVCVCLCISMCMYSYACVLGYTKFGVCTEKNKQNCTGNRSTQGLPLRNRHTGSFRFWLDFHPLASPKGTLRSLLSP

SEQ ID NO: 12564 - protein, 133 aa, Homo sapiens
  misc_feature (1)...(133): Xaa = X or * as defined in Table 2
NSEGAAWIQPPAGEPTWGQSGGTQRAGAMPPGDYSXSQGHPFLHRAPPPLTRNRRIFLRRAPSPVLEDPRKPPSRGQQRLXDALHHVLVAQLREGMLGQPRPHHPPPKPIKXSQHAXQLPAGEPEVGPGAGDR

SEQ ID NO: 12565 - protein, 298 aa, Homo sapiens
  misc_feature (1)...(298): Xaa = X or * as defined in Table 2
LRRARPRGWAGREAGPHPHXLRCRSSSAALRPAFPTRPGTGETGLDRTEGRDQTSVNSATRLPNTPSRSAGGSSLQTQRGLPGSSPQQENRPGDKAEAPKGQERMPPGDYFVIPRTPLSPPAPPPLTRNRRIFLRRAPSPVLERPPEASKQRTATPLRRTAPCASGAAQRGDVSGRKGVCKAGEQGXPPPNNPRLRRSQAHARKRRRGDKFGVRPLQYCAFXDFWRRLSWQNPFPKATLPLLRXPLPPPLQAGTAPSPPSSSQANXMITARVTVTGWRAGSGTGSKGPXEPGRASFPS

SEQ ID NO: 12566 - protein, 154 aa, Homo sapiens
  misc_feature (1)...(154): Xaa = X or * as defined in Table 2
PTDRPGEHSKTPSLQKCKKXKLAGCSGTCLXSXILGRLRQKDHLSPGVRGYNELXSCHCTPSWVAEXGPVSKXIIQSPPRKEXSLYNEKNPSNXHIVDSGEWFSFVFLGADRWGAGVLYQRVRALSQMCNERGHKHICPITIYLPYKPLCLPAL

SEQ ID NO: 12567 - protein, 194 aa, Homo sapiens
  DOMAIN (144)..(154): Acetyltransferase (GNAT) family domain identified by eMATRIX, accession number PF00583B, p-value=9.100e-10, raw score of 10.18
  misc_feature (1)...(194): Xaa = X or * as defined in Table 2
RRPQQAGKMKGSRIELGDVTPHNLFNCLILCGVTSPNIKQLKRLNQVIFPVSYNDKFYKDVLEVGELTKLAYFNDIAVGAVCCRVDHSQNQKRLYIMDTRDVWAPYRSLGIRELKCXIMCLKHLLKKMVLFDNIFLHVQISNESAIDFYRKFGFEIIAPKKNYYKRIEPADAHVLQKNLKVPSGQNADVQKTDN

SEQ ID NO: 12568 - protein, 65 aa, Homo sapiens
  misc_feature (1)...(65): Xaa = X or * as defined in Table 2
KASRKMQIETTLRYYLSPMRLAKMQMLINTSCWRKSQETRTLICXWXEGKMVQPLSKGIWPYLIQ

SEQ ID NO: 12569 - protein, 166 aa, Homo sapiens
VQRTRQLVTSPSPMSSSDEQSSSPQCTVPSKLLVDPLQHEFSKCGENDNNIPTPSNSNTPLKHSASFISATGTTEESRSVPQIKNGSVVSLQSPGSRSSSAGGTSAVEVKVEPETSSDEHPVQCQENSDEAKAPQTPSALLGQKSNTDGALQKPSNEGVIEIKATK

SEQ ID NO: 12570 - protein, 97 aa, Homo sapiens
LYSPDESHSDFEPSTVFPSANPQNMIDSSTSVYEFQTPSYLTKSNSTGQINFSPGDNQAQSEIGEQQLDFNSTVKDLLSGDSLQTNQQLKYPDVLGE

SEQ ID NO: 12571 - protein, 172 aa, Homo sapiens
  DOMAIN (136)..(157): PROLYL OLIGOPEPTIDASE SERINE PROTEASE (S9A) SIGNATURE domain identified by eMATRIX, accession number PR00862D, p-value=4.086e- 09, raw score of 16.17
MAVARLAAVAAWVPCRSWGWAAVPFGPHRGLSVLLARIPQRAPRWLPDLPNLAYKKLKGKSPGIIFIPGYLSYMNGTKALAIEEFCKSLGHACIRFDYSGVGSSDGNSEESTLGKWRKNVLSIIDDLVDGPQILVGSSLGGWLMLHAAIARPEKVVALIGVATRCRYLSDKV

SEQ ID NO: 12572 - protein, 2280 aa, Homo sapiens
  DOMAIN (749)..(762): LUTEOVIRUS ORF6 PROTEIN SIGNATURE domain identified by eMATRIX, accession number PR00910A, p-value=1.986e-11, raw score of 2.51
  misc_feature (1)...(2280): Xaa = X or * as defined in Table 2
MMRLEGAEPSGQLQNIDEEVISSACRLVCEWAQKVLSQPFDTVLELARFLVKSHYIGTKSMAALTVMAAAPAGMKGITQPSAFIPTAESNSFQPQVKTLPSPIDAKQQLQRKIQKKQQEQKLQSPLPGESAAKKSESATSNGVTNLPNGNPSILSPQPIGIVVAAVPSPIPVQRTRQLVTSPSPMSCFXRQSSSPQCTGGHSAHAVCETGTKDSPERSSQSWWGSFCPAPLPSDLTQTSEHQCTPIRSPTTVLFTSSPIKTAVVPASHMSSLNVVKMTTISLTPSNSNTPLKHSASVSSATGTTEESRSVPQIKNGSVVSLQSPGSRSSSAGGTSAVEVKVEPETSSDEHPVQCQENSDEAKAPQTPSALLGQKSNTDGALQKPSNEGVIEIKATKVCDQRTKCKSRCNEMLPGTSTGNNQSTITLSVASQNLTFTSSSSPPNGDSINKDPKLCTKSPRKRLSSTLQETQVPPVKKPIVEQLSAATIEGQKQGSVKKDQKVPHSGKTEGSTAGAQIPSKVSVNVSSHIGANQPLNSSALVISDSALEQQTTPSSSPDIKVKLEGSVFLLDSDSKSVGSFNPNGWQQITKDSEFISASCEQQQDISVMTIPEHSDINDLEKSVWELEGMPQDTYSQQLHSQIQESSLNQIQAHSSDQLPLQSELKEFEPSVSQTNESYFPFDDELTQDSIVEELVLMEQQMSMNNSHSYGNCLGMTLQSQSVTPGAPMSSHTSSTHFYHPIHSNGTPIHTPTPTPTPTPTPTPTPTPTSEMIAGSQSLSRESPCSRLAQTTPVDSALGSSRHTPIGTPHSNCSSSVPPSPVECRNPFAFTPISSSMAYHDASIVSSSPVKPMQRPMATHPDKTKLEWMNNGYSGVGNSSVSGHGILPSVSGTSGRPFQETSCFCCAWTVLSVSIQTSXHXFWSFDSCLSCAASRCHCKXHQQTGGFCSPCPSXXXRNXFICQQQLQMPECEPCCSSPTXSXWKHPLSSIXYPTIXVTPFGSPVTPEVHVFTNFTQTHVPTTXLEGAEPSGQLQNIDEEVISSACRLVCEWAQKVLSQPFDTVLELARFLVKSHYIGTKSMAALTVMAAAPAGMKGITQPSAFIPTAESNSFQPQVKTLPSPIDAKQQLQRKIQKKQQEQKLQSPLPGESAAKKSESATSNGVTNLPNGNPSILSPQPIGIVVAAVPSPIPVQRTRQLVTSPSPMSSSDGKVLPLNVQVVTQHMQSVKQAPKTPQNVPASPGGDRSARHRYPQILPKPANTSALTIRSPTTVLFTSSPIKTAVVPASHMSSLNVVKMTTISLTPSNSNTPLKHSASVSSATGTTEESRSVPQIKNGSVVSLQSPGSRSSSAGGTSAVEVKVEPETSSDEHPVQCQENSDEAKAPQTPSALLGQKSNTDGALQKPSNEGVIEIKATKVCDQRTKCKSRCNEMLPGTSTGNNQSTITLSVASQNLTFTSSSSPPNGDSINKDPKLCTKSPRKRLSSTLQETQVPPVKKPIVEQLSAATIEGQKQGSVKKDQKVPHSGKTEGSTAGAQIPSKVSVNVSSHIGANQPLNSSALVISDSALEQQTTPSSSPDIKVKLEGSVFLLDSDSKSVGSFNPNGWQQITKDSEFISASCEQQQDISVMTIPEHSDINDLEKSVWELEGMPQDTYSQQLHSQIQESSLNQIQAHSSDQLPLQSELKEFEPSVSQTNESYFPFDDELTQDSIVEELVLMEQQMSMNNSHSYGNCLGMTLQSQSVTPGAPMSSHTSSTHFYHPIHSNGTPIHTPTPTPTPTPTPTPTPTPTSEMIAGSQSLSRESPCSRLAQTTPVDSALGSSRHTPIGTPHSNCSSSVPPSPVECRNPFAFTPISSSMAYHDASIVSSSPVKPMQRPMATHPDKTKLEWMNNGYSGVGNSSVSGHGILPSYQELVEDRFRKPHAFAVPGQSYQSQSRHHDTNFGRLTPVSPVQHQGATVNNTNKQEGFAVPAPLDNKGTNSSASSNFRCRSVSPAVHRQRNLSGSTLYPVSNIPRSNVTPFGSPVTPEVHVFTNVHTDACANNIAQRSQSVPLTVMMQTAFPNALQKQANSKKITNVLLSKLDSDNDDAVRGLGMNNLPSNYTARMNLTQILEPSTVFPSANPQNMIDSSTSVYEFQTPSYLTKSNSTGQINFSPGDNQAQSEIGEQQLDFNSTVKDLLSGDSLQTNQQLVGQGASDLTNTASDFSSDIRLSSELSGSINDLNTLDPNLLFDPGRQQGQDDEATLEELKNDPLFQQICSESMNSMTSSGFEWIESKDHPTVEMLG

SEQ ID NO: 12573 - protein, 126 aa, Homo sapiens
  misc_feature (1)...(126): Xaa = X or * as defined in Table 2
VEKRQFLNSTADPECIRYPLTYFVLGQSLALVTKAGVQWRNLSSLQPPPPEFKRFSCLSLLSSWDERHAPPCPSXFCVFFLVKTGFHRVSQDGLDLLTSNDPPTSASQSAGITGVTLAPSLFVLIH

SEQ ID NO: 12574 - protein, 94 aa, Homo sapiens
  misc_feature (1)...(94): Xaa = X or * as defined in Table 2
STFFFFFKXNLARLSRLECHGTISAHCNFRLLGSSDSPALASQVAGLRGTCHHTXLIFVPTVETGFRHVGQAGLELLAWVICPPXPPKVLRLQA

SEQ ID NO: 12575 - protein, 260 aa, Homo sapiens
  misc_feature (1)...(260): Xaa = X or * as defined in Table 2
MVHITGLCADNLQYQAGARIISVPEEDNSKSLENIFGGIIEENFPSLARDLDIQIQEAQGTPGKCITKRSSPRHIVIRLFKVKTKERILRAVRQKHQVTYRGKPIRLTADFSEETLRARRDWGHIFSFLKQNDYQPRILYAAKLSIIYEGKIQSYSDKQMLREFTITNGKLLKGAVSLVVALNRXNKSWKHIKTHQNRTSLKHKSHRTYKTKIPLHDEYNDLRSALRPASHTAYGSMLMILKSSLTLFKHGDEVVGRRAK

SEQ ID NO: 12576 - protein, 129 aa, Homo sapiens
  misc_feature (1)...(129): Xaa = X or * as defined in Table 2
KTKIIQMANKHRKRHQSQXXVRLMQKKIIMIHHYIPQWLKTSKSDMIKCCSGYGTTEIFTHYLWECKLLHLLWRMVWLILLKFKTDTPHDPAIPLLGTYPAECCTCTPKAHTAALSIIVPSWEQPKYPQ

SEQ ID NO: 12577 - protein, 60 aa, Homo sapiens
VSHVITNVLQPPANRPQERGDELADSALEIFKQASAFSRASQRSVRLAPVYQKLLERMKH

SEQ ID NO: 12578 - protein, 709 aa, Homo sapiens
  DOMAIN (562)..(572): 6 kw OSTEOBLAST MAJOR IMMUNOGENIC MPB70 domain identified by eMATRIX, accession number DM01753B, p-value=1.750e-13, raw score of 6.47
  misc_feature (1)...(709): Xaa = X or * as defined in Table 2
MALFVRLLALALALALGPAATLAGPAKSPYQLVLQHSRLRGRQHGPNVCAVQKVIGTNRKYFTNCKQWYQRKICGKSTALGTADVKGVSSLAVSVSDLGGEQMRKLRPREMMKLAEDGPAALPLSNLYETLGVVGSTTTQLYTDRTEKLRPEMEGGPGSFTIFAPSNEAWAPLPAEVAGTPLVSNVNIELLNALRYHMVGRRVLTDELKHGMTLTSMYQNSNIQIHHYPNGIVTVNCARLLKADHHATNGVVHLIDKVISTITNNIQQIIEIEDTFETLRLAVAASGLNTMLEGNGQYTLLAPTNEAFEKIPSETLNRILGDPEALRDLLNNHILRSQAMCAESIVAGLSVETLEGTTLEVGCSGDMLTINGKAIISNKDILATNGVIHYIDELLIPDSAKTLFELAAESDVSTAIDLFRQAGLGNHLSGSERLTLLGPLNSVFKDGNPPIDALTRDLLWNHIIKDQLASKYLYHGQTLETLGGKKLRVFVYRNSLCIENSCIAAHDKRGRYGTLFTMDRVLTPPMGTVMDVLKGDNRFSMLVAAIQSAGLTETLNREGVYTVFAPTNEAFRALPPRERSRLLGDAKELANILKYHIGDEILVSGGIGALVRLKSLQGDKLVSSAXKTNVVSVNKEPVAEPDIMATNGVVHVITNVLQPPANRPQERGIDLADFAVEIFKQAFSVFPGASQRSVRLAPVYQKYLERMKH

SEQ ID NO: 12579 - protein, 136 aa, Homo sapiens
  misc_feature (1)...(136): Xaa = X or * as defined in Table 2
FFFLKRRDLAVAQTGVQWGDHGSLQPQIPGRRQSSDLSFLNSXDHRHILSCSATFTSFXRSHSAAQAGLEILATSNPPAXASQGPGIXGVSHHTWQKATFCICLPANNILSCLNIYSFFYHKTNHNFIMKTNHKQI

SEQ ID NO: 12580 - protein, 133 aa, Homo sapiens
  misc_feature (1)...(133): Xaa = X or * as defined in Table 2
RLFYNFTIEMRFSLFVQGCLINSLGXSDLLVFASASAGITGVSYPHALASIVFVCVCVXWGSALVAQAGVQXRNLSSLQPLPPEFKQFSFLSLPSSWIYRHPPPPLSFYLPKLKSCGLCTGIWAWRLFIFIGS

SEQ ID NO: 12581 - protein, 78 aa, Homo sapiens
  misc_feature (1)...(78): Xaa = X or * as defined in Table 2
TRSAVVXSQLTAALTSLVKQLSQLSLPRSWDYTHVPPCLSIFYFLXRXGLPMLPGLVSNSWTQAIFLPQPPKVLGLQA

SEQ ID NO: 12582 - protein, 200 aa, Homo sapiens
  DOMAIN (66)..(165): K+ channel tetramerisation domain identified by PFam, accession name K_tetra, E-value=1.1e-07, PFam score of 37.8
VMSWAFTFIHHSLTDSPRATSSPPSPIHEGDQDIIVLKFLKVLGGKNSGAWGRNGRPQGRRRGARFLRLNVGGCIYTARRESLCRFKDSMLASMFSGRFPLKTDESGACVIDRDGRLFKYLLDYLHGEVQIPTDEQTRIALQEEADYFGIPYPYSLSDHLANEMETYCFKALTDFCDSYGLVCNKPTVWVLHYLNTSGAS

SEQ ID NO: 12583 - protein, 154 aa, Homo sapiens
  misc_feature (1)...(154): Xaa = X or * as defined in Table 2
RWSFTLVAQAGVQRVILAHAQPPPPGFKRFSCLSLPSSWDYRLAPPRLANFXFLVETGFLHVGQAGLELPTSGDPPASASQSARIIGVPLCPGISRIFVQQMALEDRDSISLRLWFLSRHANLQCVTLSWACQLLPCGTWRARETKANTLPAVP

SEQ ID NO: 12584 - protein, 65 aa, Homo sapiens
  DOMAIN (12)..(64): Guanine nucleotide exchange factor for Ras-l domain identified by PFam, accession name RasGEFN, E-value=2.9e-19, PFam score of 77.4
YENESALNLYETCKVRTVKAGTLEKLVEHLVPAFQGSDLSYVTIFLCTYRAFTTTQQVLDLLFKS

SEQ ID NO: 12585 - protein, 145 aa, Homo sapiens
  misc_feature (1)...(145): Xaa = X or * as defined in Table 2
PSASSGQAGGFWSQSLFKQESSGFVRTSAESVLRQESLRGVLGVLELYWRGSEVCGSRQSLYGLSSGRGILQGPQEHPXSPLCPSPPELKIPENANVFYAMNSTANYDFVLKKRTFTKGVKVKHGASFTLPRMKQKGLKIAKGIF

SEQ ID NO: 12586 - protein, 122 aa, Homo sapiens
  DOMAIN (38)..(94): Guanine nucleotide exchange factor for Ras-l domain identified by PFam, accession name RasGEFN, E-value=1.6e-19, PFam score of 78.3
  misc_feature (1)...(122): Xaa = X or * as defined in Table 2
GLGVPSELQEIRVLPLTVCPSSVPPQYENESALNLYETCKVRTVKAGTLEKLVEHLVPAFQGSDLSYVTIFLCTYRAFSASQQVLDLLFKRXAXALHCTGCTRGPRPHPHLAAGLGNAESPL

SEQ ID NO: 12587 - protein, 1059 aa, Homo sapiens
  DOMAIN (613)..(637): Guanine-nucleotide dissociation stimulators CDC25 family sign domain identified by eMATRIX, accession number BL00720B, p-value= 4.500e-23, raw score of 16.57
  DOMAIN (521)..(738): RasGEF domain identified by PFam, accession name RasGEF, E- value=6e-80, PFam score of 279.0
  misc_feature (1)...(1059): Xaa = X or * as defined in Table 2
MVQRMWAEAAGPAGGAEPLFPGSRRSRSVWDAVRLEVGVPDSCPVVLHSFTQLDPDLPRPEVGGGRGLLQKSASRVGSGGCRRAPSNSRDHGWGFAPLNTVPGPAVTKAAAAQVDLFLRHCPCLHRWPVPYFTQFPPRARSASLAFTMQAVGLCSRQSVPYLGNRLHRCIPCTVARQALDVPAPGCRALSSQSSTQEIGEELINGVIYSISLRKVQLHPAGNKGQRWLGYENESALNLYETCKVRTVKAGTLEKLVEHLVPAFQGSDLSYVTIFLCTYRAFTTTQQVLDLLFKRYGRCDALTASSKYGCILPYSDEDGGPQDQLKNAISSILGTWLDQYSEDFCQPPDFPCLKQLVAYVQLNMPGSDLEHRAHFLLAHLEHSEPIEAEPEGEEDWALSPVPALKPTPELELALTPARAPSPVPAPAPEPKTNSTSVSGSKLEETPAPAPELRRAPXPAVGLESAPAPALELEPAPEQDPAPSQTLELEPAPAPVPSLQPSWPSPVVAKNGLSEEKPHLLVFPPDLVAEQFTLMDAELVKKEGPYHWPGFIWSQRDKKGKELLAPTIRATVTQFNSVANIVITTCLGNRSTKAPDRARVVEHWIEVARECRILKNFSSLYAILSALQSNSIHRLKKTWEDVSRDSFRIFQKLSEIFSDENNYSLSRELLIKEGTSKFATLEMNPKRAHKRPKETGIIQGTVPYLGTFLTDLVMLDTAMKDYLYGRLINFEKRRKEFEVIAQIKLLQSACNNYSIAPDEQFGAWFRAVERLSETESYNLSCELEPPSESASNTLRTKKNTAIVKRWSDRQAPQHXAQLPVGSSHFQVPVDQFRCSGPYFSSGDIADALSVHSAGSSSSDVEEINISFVPESPDGQEKKKFWENSAFKSYSPETSGISSASSSTSSPXASTTPVAATRTHKRSVSGLCNSSSALPLYNQQVGRLVVIIRVSWDVGQWATCYKSILVVTSQDKAPAVIRKAMDKHNLEEEEPEDYELLQILSDDRKLKIPENANVFYAMNSTANYDFVLKKRTFTKGVKVKHGASSTLPRMKQKGLKIAKGIF

SEQ ID NO: 12588 - protein, 144 aa, Homo sapiens
  DOMAIN (6)..(35): PROTEIN PHOSPHATASE PP2A 55KD REGULATORY SUBUNIT SIGNATURE domain identified by eMATRIX, accession number PR00600C, p-value= 7.643e-29, raw score of 10.70
  DOMAIN (1)..(144): Protein phosphatase 2A regulatory subunit PR domain identified by PFam, accession name PR55, E-value=6.8e-10, PFam score of -104.8
EKINKIRWLPQQNAAHFLLGTNDKAIKLWKISERDKKAEGYNLKDEDGRLRDPFRITALRVPILKPMDLMVEASPRRIFANAHTYHINSISVNSDHETPNIVDIKPANMEELTEVITAAEFHPHQCNVFVYSSSKGTIRLCDMR

SEQ ID NO: 12589 - protein, 63 aa, Homo sapiens
  DOMAIN (23)..(51): PROTEIN PHOSPHATASE PP2A 55KD REGULATORY SUBUNIT SIGNATURE domain identified by eMATRIX, accession number PR00600D, p-value= 7.692e-35, raw score of 10.70
  misc_feature (1)...(63): Xaa = X or * as defined in Table 2
VPILKPMGSYGXEASPRRIFANAHTYHINSISVNSDHETYLSADDLRINLWHLEITDRSFNIV

SEQ ID NO: 12590 - protein, 482 aa, Homo sapiens
  DOMAIN (115)..(156): Protein phosphatase 2A regulatory subunit PR55 proteins domain identified by eMATRIX, accession number BL01024B, p-value= 1.000e-40, raw score of 8.91
  DOMAIN (4)..(482): Protein phosphatase 2A regulatory subunit PR domain identified by PFam, accession name PR55, E-value=3.1e-194, PFam score of 658.7
  misc_feature (1)...(482): Xaa = X or * as defined in Table 2
PLRSWLPRLPDSQADIISTVEFNYSGDLLATGDKGGRVVIFQREQEVLAQPRRPALPXSVSSFLSTSCREVWQGCEFSLPFRERIKGRPHSRGEYNVYSTAFQSHGTGGFDYLKSLEIEEKINKIRWLPQQNAAHFLLSTNDKTIKLWKISERDKRAEGYNLKDEDGRLRDPFRITALRVPILKPMDLMVEASPRRIFANAHTYHINSISVNSDHETYLSARXPGGINLWHLGNHRXEAFNIVDIKPANMEELTEVITAAEFHPHQCNVFVYSSSKGTIRLCDMRSSALCDRHSKSFFEEPEDPKSSRSFFSEIISSISDVKFSHSGRYMMTRGLPVRWKVWGPSTWEEAGPVGGPTRVHEYLRTKLCSLYENDCIFDKFECCWNGSDSAIMTGSYNNFFRMFDRDTRRDVTLEASRESSKPRASLKPRKVCTGGKRRKDEISVDSLDFNKKILHTAWHPVGQCYLPWLATNNLYIFQDKIN

SEQ ID NO: 12591 - protein, 130 aa, Homo sapiens
FCACFIGSKTPASCRAQGRRPGEFSPGSPSGPAGGKGVLKELEPSEMPPPEAGERKLERKTVPGRGAEYGPPHLRLSYPQAVNSHPLPSSVNGGGDSNNSSQLPESHCPPFSPKEGPRKGEVPCLHATRA

SEQ ID NO: 12592 - protein, 99 aa, Homo sapiens
  misc_feature (1)...(99): Xaa = X or * as defined in Table 2
SLLGPPEPTTWTPAPQDRXHGPCXGRXRKRRPSLXTXQWELASPPREPMFVPKKEMVAIQPLQEEASVGPTPELLSGSCRSPISGISILGNCPSLAPLT

SEQ ID NO: 12593 - protein, 176 aa, Homo sapiens
  DOMAIN (39)..(140): K+ channel tetramerisation domain identified by PFam, accession name K_tetra, E-value=0.0025, PFam score of -7.1
AEGDQDIIVLKFLKVLGGKNSGAWGRNGRPQGRRRGARFLRLNVGGCIYTARRESLCRFKDYNVASMFSGRFPLQTDESGACVIDRDGRLFKYLLHYPSWRSSEFPQMRDTRGRPTGKRADYFGIPYPYSLSDHLANEMETYSLRSNIELKKALTDFCDSYGLVCNKPTVWVLHYP

SEQ ID NO: 12594 - protein, 165 aa, Homo sapiens
  DOMAIN (33)..(66): PROLINE-RICH PROTEIN 3 domain identified by eMATRIX, accession number DM00215, p-value=6.339e-09, raw score of 19.43
  misc_feature (1)...(165): Xaa = X or * as defined in Table 2
HELILSPGPTQGQTPDEAGVIIRVLKNVPDLAILNSKDALDPRQPGYQPPNPHPGPSSPPAAPRPRGAXGNPQLENASRSDRNPSQGLRTRIRRPETPDCGPPSPAGSSPAPPPSDVPPAFHSSGPPEPTTWTPAPQDRXHGPXGDKRGAPGVAGEDPDQPXGTS

SEQ ID NO: 12595 - protein, 234 aa, Homo sapiens
MVAASAAIKFKTNMSLAIAIAGEHVEFALIPVTAVKYTYTVIPALVMTWCLSYIERWVDSITPAVTKNFLKPMLIVLIAAPLAILLIGPIGIWIGSAISALVYTIHGYLGWLSVAIMGALWPLLVMTGMHRVFTPTIIQTIAETGKEGMVMPSEIGANLSLGGSSLAVAWKTKNPELHLDTPHTESPTPHDSNSHRPPTAGVYNRSKAKSTDKDNDQTRWGNWRWSQRKYCLPL

SEQ ID NO: 12596 - protein, 109 aa, Homo sapiens
RALTPRHLPCTSQVASCNLCCLFLADLDTLHTESPTPHDSNSHRPPTAGVYNRSKAKSTDKDNDQTRWGNWRWSQRKYCLPLIVLSFFQTKQNTGTFGRNFLSPFLMYV

SEQ ID NO: 12597 - protein, 294 aa, Homo sapiens
  misc_feature (1)...(294): Xaa = X or * as defined in Table 2
VPQFKPKLHQENGPGLARCDHQQGAQPTRETWLQDRDREFQSQTKFLLRSRVXLVLQLQESQHSLERLREGQRLVEREQARMRAQQSLLGHWKHGRQRSLPAVLLPGGPEVMELNRSESLCHENSFFINEALVQMSFNTFTKLNPSVIHQDATYPTTQSHSDLVRTSEHQVDLKVDPSQPSNVSHKLWTAAGSGHQILPFHESSKDSCKNDLDTSHTESPTPHDSNSHRPPTAGVYNRSKAKSTDKDNDQTRWGNWRWSQRKYCLPLIVLSFFQTKQNTGTFGRNFLSPFLMYV

SEQ ID NO: 12598 - protein, 71 aa, Homo sapiens; identical to SEQ ID NO: 10264

SEQ ID NO: 12599 - protein, 84 aa, Homo sapiens
MRLGKTHSTAGAWKMGLLRQADSTRGEKRGGKKAAIICVKSPPGYQVVAVWKYHSSLGVFEFKKTCVSMMGRHDTEKKMSWERP

SEQ ID NO: 12600 - protein, 14 aa, Homo sapiens
MEFCVNSQKCDINS

SEQ ID NO: 12601 - protein, 94 aa, Homo sapiens
  misc_feature (1)...(94): Xaa = X or * as defined in Table 2
RALYYFLXFALFGLTXMXLVSXKLQIIEYEKKQTLGQNDTGFICDGTANTFRVMFKEPIEILPNVCYTACATLKVRVMHYVPDGFLLNVAECVF

SEQ ID NO: 12602 - protein, 60 aa, Homo sapiens
  misc_feature (1)...(60): Xaa = X or * as defined in Table 2
KQWHESHPDYDRSPSQTGEGDEPCSWHRLFAQGDKXYEATACHRNLDWQKATDISCNTNG

SEQ ID NO: 12603 - protein, 198 aa, Homo sapiens
MAVHPVVITVIISILGIISSVPHTERQQRQEGCGLHVRQLDLGRRGGHAAVEHGVKDGAAGRQHEAVGGDALRAPSGGGAATLAQYEAHIAQQLRVEEEGEALLQRRLGRLPVVERFPLQGEQGPQRGRPLITKSSAPIVYLGHVPRPVPRSVLPGSGGAGKYGQGNTVSRVRSFWWVRGLADFKNGAVDLPDEFYSS

SEQ ID NO: 12604 - protein, 253 aa, Homo sapiens
  misc_feature (1)...(253): Xaa = X or * as defined in Table 2
SVEFPCRLSGAVVRWAEAECQRQQLPVTFGNKQKVLGKALSLIRFPLMTIEEFAAGPAQSGILSDREVVNLFLHFTVNPKPRVEYIDRPRCCLRGKECCINRFQQVESRWSYSGTSDRIRFTANRRTSIVGLGLYGSIHGPTDYQVNIQIIEYEKKQTLGQNDTGFSCDGTANTFRVMFKEPIEILPNVCYTACATLKGPDSHYGHKRIXRKVVHGGHLLASKDCFFLFXFALGINNGTSIEDGQIPEIIFYT

SEQ ID NO: 12605 - protein, 39 aa, Homo sapiens
  misc_feature (1)...(39): Xaa = X or * as defined in Table 2
IFLLYLKNKVQNKXEIKQHFLGKIMSRDNNTYLTWGTEN

SEQ ID NO: 12606 - protein, 118 aa, Homo sapiens
  DOMAIN (82)..(102): kw TRANSCRIPTASE REVERSE II ORF2 domain identified by eMATRIX, accession number DM01354W, p-value=2.646e-13, raw score of 12.64
  misc_feature (1)...(118): Xaa = X or * as defined in Table 2
LKSKLSDYKINLQKSVTFVYTNSNXSEKQFKKEIQFTNSCKDNXKNYLGINVIKEVKDLYNENYXILIKNEKNPKKWRAIPCSWFGRINIVNKFILPKVGYRSNAIPMKMPVTSRTRG

SEQ ID NO: 12607 - protein, 230 aa, Homo sapiens
  misc_feature (1)...(230): Xaa = X or * as defined in Table 2
YLFIYLLPRLKCSGVITAHCSLYLPGSKYPPHSASXVAGTTGPATMSSXYFXFFVETRFFLCSPGWSXGSSSDPSASASQSIVKIGVSHCTCPRNFRNRLAQSLHFTGEETVPRKKGDLPWVYRQTQGXIPGPHRCQVLAFXPKDFLLSPHIYVSTSILWPPPAXAQAEVQWCDHSSLQPLPPRFKISSPLSLLSSWNHRSCHHVQLIFLIFCRDKVLPVFPRLVLRELQ

SEQ ID NO: 12608 - protein, 114 aa, Homo sapiens
  misc_feature (1)...(114): Xaa = X or * as defined in Table 2
KRGFNFGAPDKREWGEFGXLKPWLPGXNNFSGQTLRRSGDXRKTPHGGVNLVFXEKTGFSNLGRGGLKPPPSGNTPAWPPKGVGITGGASSSPPVFCFLGFCENTNLRAKKKFI

SEQ ID NO: 12609 - protein, 80 aa, Homo sapiens
STFFFFCETESSSVTQAGVQWHNFSSLQPPPPRFKQFSCLSLPSSWDYRCAPPCPSNFCVFSRDGDSPRWPGWSPTPDLK

SEQ ID NO: 12610 - protein, 87 aa, Homo sapiens
  misc_feature (1)...(87): Xaa = X or * as defined in Table 2
ASVTQAGVQWHNLGSLQPPPPRFKQFSCLSLPSSWDYRRPPPCPTNFLFLVLARMVSISXPHDPPASASRSAEITGVNHHARPGLFL

SEQ ID NO: 12611 - protein, 102 aa, Homo sapiens
  misc_feature (1)...(102): Xaa = X or * as defined in Table 2
EQKFNKQKGRRALRCRGGLSGLLSCSKDVKVSFFSVARLQCSGLILAHCNLHLPGSDSPASASXVVGTPGQRHHAQLGFVFLVEMGFHHVGPGMVFDLLTSG

SEQ ID NO: 12612 - protein, 401 aa, Homo sapiens
  misc_feature (1)...(401): Xaa = X or * as defined in Table 2
GGIPALDKNVAELTVMDVYDILSLVGHEVERVIDQHGCEAIARLMPKVVRVLEILEVLVSRHHVAPELDELRLELAPLRRVRMDLIEKERKHQKELELVEDVWRGEAQDLLSQIAQLQEENKQLMTNLSHKDVNFSEEEFQKHEGMSERERQVMKKLKEVVDKQRDEIRAKDRELGLKNEDVEALQQQQTRLMKINHDLRHRVTVVEAQGKALIEQKVELEADLQTKEQEMGSLRAELGKLRERLQGEHSQNGEEEPETEPVGEESISDAEKVAMDLKDPNRPRFTLQELRDVLHERNELKSKVFLLQEELGLLXEXRNGRGKPNTPTPTHRPPEDGPPSRESGIKATCLASFFPEVKKRLGQTHRGNVHIQGVPLDKLGKHPTAMTGYTEQRTGSPCSIC

SEQ ID NO: 12613 - protein, 472 aa, Homo sapiens
  misc_feature (1)...(472): Xaa = X or * as defined in Table 2
FKDPEAVRALTCTLLREDFGLSIDIPLERLIPTVPLRLNYIHWVEDLIGHQDSDKSTLRRGIDIGTGASCIYPLLGATLNGWYFLATEVDDMCFNYAKKNVEQNNLSDLIKVVKVPQKTLLMDALKGSIXVXSMTFCMCNPPFFANQIGSQVEXYSRNPRRPPPSSVNTGGITEIMAEGGELEFVKRIIHDSLQLKKRLRIDMAALLIGVCSEVSGRKDWIQQLAPRWYSCMLGKKCSLAPLKEELRIQGVPKVTYTEFCQGRTMRWALAWSFYDDVTVPVHEGRLAVGGVTSDSQNKGSASPPSKRRKLEKPRKPITFVVLASVMKELSLKASPLRSETAEGIVVVTTWIEKILTDLKASINEFPVEKRKSAFSXRPXKTPGFIXGERKESVXDSDKSTLRRGIDIGTGASCIYPLLGATLNGWYFLATEVDDMCFNYAKKNVEQNNLSDLIKVVKVPQKTLLMDALKGSI

SEQ ID NO: 12614 - protein, 203 aa, Homo sapiens
  misc_feature (1)...(203): Xaa = X or * as defined in Table 2
LEEPRPQSLEGHTEGERAALPGKAKVVEGRVADDGVPGQPAWPGAPPHTAAFQPVHALGSTRASQQGSLGDCXAACRXQXKAPXVPKQGTXQERSSTKPRAVPSGHWAGGSGCRCSEXRAALGXTTEPQQSGELPGPPWPLEGAAHPLSAETGSCVPPRAFSGQGKQPRGPGXAAEGPHGDFPQTGDRHCPPSSTEPSGMTGR

SEQ ID NO: 12615 - protein, 38 aa, Homo sapiens
FSGLFLDFISFLGPMSGMGMNMGMDGQWHYMYPSSCKA

SEQ ID NO: 12616 - protein, 316 aa, Homo sapiens
  DOMAIN (257)..(308): ATP synthase gamma subunit proteins domain identified by eMATRIX, accession number BL00153C, p-value=1.000e-40, raw score of 18.67
  DOMAIN (35)..(314): ATP synthase domain identified by PFam, accession name ATP- synt, E-value=8.6e-108, PFam score of 371.5
  misc_feature (1)...(316): Xaa = X or * as defined in Table 2
PTFSRAVATMFSRAGVAGLSAWTLQPQWIQVRNMATLKDITRRLKSIKNIQKITKSMKMVAAAKYARAERELKPARIYGLGSLALYEKADIKGPEDKKKHLLIGVSSDRGLCGAIHSSIAKQMKSEVATLTAAGKEVMLVGIGDKIRGILYRTHSDQFLVAFKEVGRKPPTFGDASVIALELLNSGYEFDEGSIIFNKFRSVISYKTEEKPIFSLNTVASCXQHGVSYDDIDADVAAKITQEYNLANIIYYSLKESTTSEQSARMTAMDNASKNASEMIDKLTLTFNRTRQAVITKELIEIISGAASSVKKENSAS

SEQ ID NO: 12617 - protein, 112 aa, Homo sapiens
MEVGKLSKGVWEEPALPDERKTFASARGPVRKADTPVHRAAAGTAWRKVQCLTKDDAVWCVKENGLDISSLGLIPAQTTCVILHPYPSEEQKKQLAQDTGLTILQVNNWKAH

SEQ ID NO: 12618 - protein, 463 aa, Homo sapiens
  DOMAIN (243)..(286): 'Homeobox' domain proteins domain identified by eMATRIX, accession number BL00027, p-value=7.840e-19, raw score of 26.43
  misc_feature (1)...(463): Xaa = X or * as defined in Table 2
GAHAPHPNVMPASMGSAVNDALKRDKDAIYGHPLFPLLALVFEKCELATCTPREPGVAGGDVCSSDSFNEDIAVFAKQVRAEKPLFSSNPELDNLMIQAIQVLRFHLLELEKGHELCDNFCHRYISCLKGKMPIDLVIDERDGSSKSDHEELSGSSTNLADHNPSSWRDHDDATSTHSAGTPGPSSGGHASQSGDNSSEQGDGLDNSVASPGTGDDDDPDKDKKRQKKRGILPIVFPNIMRAWLFQHLTHPYPSEEQNIQLAHDTGLTIFQVNNWFINARIGIVQPMIDQSNRAGFLLDPSVSQGAAYSPEGQPMGSFVLDGQQHMGIRPAGTYEWDGAXIWAWMGNGTTCXPSSCXRHSQSKGEVCRAWPGDYVSQGGPMGMSMAQPSYTPPQMTPHPTQLRHGTPNAFHILPSLPHHPGLDXLHGGTPYPTWDXLCXAQSPTMLNSVDPNVGGQVMDIHAQ

SEQ ID NO: 12619 - protein, 285 aa, Homo sapiens
  DOMAIN (199)..(254): Domain present in ZO-1 and Unc5-like netrin receptors domain identified by eMATRIX, accession number PF00791B, p-value=9.894e- 15, raw score of 28.49
  DOMAIN (198)..(264): Ank repeat domain identified by PFam, accession name ank, E- value=7e-14, PFam score of 59.5
  misc_feature (1)...(285): Xaa = X or * as defined in Table 2
TMRPDIDNSQAAHQPPGRLPNSRKLKKTRRQMCCVQTKKRIARLPPCCRNTPTTARSHPGRDCAKPNTXSLRSPGGDCHXQGNTTWRMPMARXLSGDSESGRSPVRTIICHQPSRSQSPVDRLQQLLPASQSTQLPCSSSPQETTQSRPMPPEARRLIVNKNAGETLLQRSARLGYEGSVLYCLENKICDVNHRDNAGYCALHEACARGWLKFVRHLLEYGADVNCSAQDGTRPLHDAVENDHLEIVRLLLSYGADPTLATYSGRTIMKMTHSELMEKFLTDLFK

SEQ ID NO: 12620 - protein, 148 aa, Homo sapiens
  misc_feature (1)...(148): Xaa = X or * as defined in Table 2
KLLRWLRQENCLNLGGGSCSELKSHHCTPPWMIEGDSIXKKQNKTKTRKRKPQGSHSTLSGGPDWVXQNCEVSQVLPISHFPLLQDILPPLPYLGANGQAGEQGATDGHXRTTTESHRASVGCRIPWLCQRPLALALSFFLCEMRTIP

SEQ ID NO: 12621 - protein, 109 aa, Homo sapiens
  misc_feature (1)...(109): Xaa = X or * as defined in Table 2
EMSFALVAQAGVQRHNLGSLLPLPPGFKXFSCLSLPSSWDYRYAPPTPANFAFLVETGCLHVGQAGLKLPNSGNLPTSASESAGIIGVSHCAQPGTATHSNTVLSGLFC

SEQ ID NO: 12622 - protein, 120 aa, Homo sapiens; identical to SEQ ID NO: 8610
  DOMAIN (27)..(82): Helicases conserved C-terminal domain identified by PFam, accession name helicase_C, E-value=0.0019, PFam score of 19.5
  misc_feature (1)...(120): Xaa = X or * as defined in Table 2

SEQ ID NO: 12623 - protein, 106 aa, Homo sapiens
  misc_feature (1)...(106): Xaa = X or * as defined in Table 2
ARGIDVQQVSLVINYDLPTNRENYIHRXAXIWNTPLPLHTWPSLGLKLLIFLIPFLVFQIGRGGRFGRKGVAINMVTEEDKRTLRDIETFYNTSIEEMPLNVADLI

SEQ ID NO: 12624 - protein, 240 aa, Homo sapiens
  DOMAIN (156)..(202): DEAD-box subfamily ATP-dependent helicases proteins domain identified by eMATRIX, accession number BL00039D, p-value=7.400e- 26, raw score of 21.67
  DOMAIN (37)..(201): Helicases conserved C-terminal domain identified by PFam, accession name helicase_C, E-value=1.3e-06, PFam score of 35.4
  misc_feature (1)...(240): Xaa = X or * as defined in Table 2
NSNVEREEWKLDTLCDLYETLTITQAVIFINTRRKVDWLTEKMHARDFTVSAMHGDMDQKERDVIMREFRSGSSRVLITTDLLAEXRELIAKAEGRIQGDSLSKGTSVPLRKVAAWNIIWHAXGLWGTGMLISSAFLGCPHGCLSVFPPGXSVLRAHAEELSFLTHARGIDVQQVSLVINYDLPTNRENYIHRIGRGGRFGRKGVAINMVTEEDKRTLRDIETFYNTSIEEMPLNVADLI

SEQ ID NO: 12625 - protein, 420 aa, Homo sapiens
  DOMAIN (51)..(90): DEAD-box subfamily ATP-dependent helicases proteins domain identified by eMATRIX, accession number BL00039A, p-value=6.824e- 33, raw score of 18.44
  DOMAIN (45)..(245): DEAD/DEAH box helicase domain identified by PFam, accession name DEAD, E-value=1.2e-50, PFam score of 163.1
  misc_feature (1)...(420): Xaa = X or * as defined in Table 2
MSASQDSRSRDNGPDGMEPEGVIESNWNEIVDSFDDMNLSESLLRGIYAYGFEKPSAIQQRAILPCIKGYDVIAQAQSGTGKTATFAISILQQIELDLKATQALVLAPTRELAQQIQKVVMALGDYMGASCHACIGGTNVRAEVQKLQMEAPHIIVGTPGRVFDMLYRKYTLSPKYIKMFVLDEADEMLSRGFKGQIYDISKRLNSTTKVVLLSATMPFDVLEVTKKFMRGPPFRILVKKEELTLEGIRQFYINVEPEEFNLDTLCDLYENLDHHPRQVIFHQPPGGKVDWLSPEKMHARDFTVSAMHWRFWTQKERRTXLXREFRSGSXPEFXITPLTLPAQRAFDVASRVSFXSFKLMTLPPPTRGKLLIHRIGSRVDRFGRKGVPINMLTEEKTKRNLEDIETFYNTSIEEMPLNVA

SEQ ID NO: 12626 - protein, 62 aa, Homo sapiens
  misc_feature (1)...(62): Xaa = X or * as defined in Table 2
MKEEILKKTAELYKRAMXNKXKQKHHSWVXKAPSRPFIKWETRLGLKTAHSPNVFLQQGQRX

SEQ ID NO: 12627 - protein, 151 aa, Homo sapiens
  DOMAIN (56)..(76): ATP SYNTHASE GAMMA SUBUNIT SIGNATURE domain identified by eMATRIX, accession number PR00126A, p-value=7.968e-18, raw score of 10.39
  DOMAIN (28)..(151): ATP synthase domain identified by PFam, accession name ATP- synt, E-value=6.5e-31, PFam score of 111.0
YLSKLPYFELESIAAARSRPTAQRHPRERKLKPARIYGLGSLALYEKADIKGPEDKKKHLLIGVSSDRGLCGAIHSSIAKQMKSEVATLTAAGKEVMLVGIGDKIRGILYRTHSDQFLVAFKEVGRKPPTFGDASVIALELLNSGYEFDEG

SEQ ID NO: 12628 - protein, 681 aa, Homo sapiens
  DOMAIN (515)..(533): KINESIN LIGHT CHAIN SIGNATURE domain identified by eMATRIX, accession number PR00381D, p-value=1.318e-10, raw score of 13.94
  DOMAIN (311)..(594): TPR Domain domain identified by PFam, accession name TPR, E- value=6e-33, PFam score of 122.9
MPEISLSVHAQRRDHVSIWCDGSAYTPRETKENEIQDLLRAKRELESKLQRLQAQGIQVFDPGESDSDDNCTDVTAAGTQCEYWTGGALGSEPSIGSMIQLQQSFRGPEFAHSSIDVEGPFANVNRDDWDIAVASLLQVTPLFSHSLWSNTVRCYLIYTDETQPEMDLFLKDYSPKLKRMCETMGYFFHAVYFPIDVENQYLTVRKWEIEKSSLVILFIHLTLPSQDRVTWRSADELPWLFQQQGSKQKLHDCLLNLFVSQNLYKRGHFAELLSYWQFVGKDKSAMATEYFDSLKQYEKNCEGEDNMSCLADLYETLGRFLKDLGLLSQAIVPLQRSLEIRETALDPDHPRVAQSLHQLASVYVQWKKFGNAEQLYKQALEISENAYGADHPYTARELEALATLYQKQNKTADQFLKRSLEMRERVLGPDHPDCAQSLNNLAALCNEKKQYDKAEELYERALDIRRRALAPDHPSLAYTVKHLAILYKKMGKLDKAVPLYELAVEIRQKSFGPKHPSVATALVNLAVLYSQMKKHVEALPLYERALKIYEDSLGRMHPRVGETLKNLAVLSYEGGDFEKAAELYKRAMEIKEAETSLLGGKAPSRHSSSGDTFSLKTAHSPNVFLQQGQRFVMTVYLENAVVSAQNLLKLISNFSKVSGYKINVQKSQAFIYTNNRQRAKS

SEQ ID NO: 12629 - protein, 60 aa, Homo sapiens
  misc_feature (1)...(60): Xaa = X or * as defined in Table 2
QTFVLAEGKHXENEPVFKLNVSPLDEWREGAFPPKSDVSASFISIALLYNSAAFSKSPPS

SEQ ID NO: 12630 - protein, 300 aa, Homo sapiens
  DOMAIN (192)..(210): KINESIN LIGHT CHAIN SIGNATURE domain identified by eMATRIX, accession number PR00381D, p-value=1.318e-10, raw score of 13.94
  DOMAIN (70)..(273): TPR Domain domain identified by PFam, accession name TPR, E- value=1.8e-19, PFam score of 78.1
  misc_feature (1)...(300): Xaa = X or * as defined in Table 2
HILLVNLKHLQLCTRNKRNIFKLFHFRKKSFMGHQRAIKKKGNLYGFALLRRRALQVEELTLGKDTPDNARTLNELGGLYYLQNNLETADQVLKRFLXMRERVLGPDHPDCAQALNNGAGSYAMKKNQYDKPEDLYKRALDIGRRALAPDHPFLAYTVKHLAILYKKMGKLDKAVPLYELAVEIRQKSFGPKHPSVATALVNLAVLYSQMKKHVEALPLYERALKIYEDSLGRMHPRVGETLKNLAVLSYEGGDFEKAAELYKRAMEIKEAETSLLGGKAPSRHSSSGDTFSLKNQLHFS

SEQ ID NO: 12631 - protein, 109 aa, Homo sapiens
  misc_feature (1)...(109): Xaa = X or * as defined in Table 2
PGQHGETLPLLKIQKLAGQGGTSLXSEPLRRLRQENCLNLGGRGCSETRSCHCTLVWVTGRDSISKQKTAVDQAEERVSELEDRLFENTQSEKTKEKRIKISTLRGFRK

SEQ ID NO: 12632 - protein, 138 aa, Homo sapiens
  misc_feature (1)...(138): Xaa = X or * as defined in Table 2
AKGQVALGRPGARMQGGSKVVGVLAGPGSRSEAGTVPSYPAAQTRPHPPPQPLLIFRSPGVVPNGHQGPPNSTASSKQCNLRCWGLPTVARHPKSGQRPQPRPTRXPGPSPQGPTPGRKNPERPXLVQQXPCWAREPV

SEQ ID NO: 12633 - protein, 52 aa, Homo sapiens
  DOMAIN (15)..(43): PH domain identified by PFam, accession name PH, E-value= 0.0062, PFam score of 15.5
LFQTIFEDVSGFGAWHRRWCVLSGNCISYWTYPDDEKRKVIYIVLFSGESPD

SEQ ID NO: 12634 - protein, 55 aa, Homo sapiens
TDPSPQASDYETMETVVQIQEEKSESQLSVSPGKNQESEAGELSHNQLSSPLGFQ

SEQ ID NO: 12635 - protein, 176 aa, Homo sapiens
  DOMAIN (37)..(161): PH domain identified by PFam, accession name PH, E-value=2e- 15, PFam score of 60.1
ESESYWAICSRKRSPVLSSYGGHIYLKIRCPVDSSVGRRGFLTIFEDVSGFGAWHRRWCVLSGDCISYWAYPDDEKRKNPIGRINLANCTSRQIEPANREFCARRNTFELITVRPQREDDRETLVSQCRDTLCVTKNWLSADTKEERDLWMQKLNQVLVDIRLWQPDACYEPIGKP

SEQ ID NO: 12636 - protein, 812 aa, Homo sapiens
  DOMAIN (642)..(797): PH domain identified by PFam, accession name PH, E-value=8.3e -12, PFam score of 47.2
  misc_feature (1)...(812): Xaa = X or * as defined in Table 2
IKALSSSAEDASLVNASISSSVKATSPVKSTTSITDAKSCEGQNPELLPKTPISPLKTGVSKPIVKSTLSQTVPSKGELSREICLQSQSKDKSTTPGGTGIKPFLERFGERCQEHSKESPARSTPHRTPIITPNTKAIQERLFKQDTSSSTTHLAQQLKQERQKELACLRGRFDKGNIWSAEKGGNSKSKQLETKQETHCQSTPLKKHQGVSKTQSLPVTEKVTENQIPAKNSSTEPKEVIREIEMSVDDDDINSSKVINDLFSDVLEEGELDMEKSQAGDGSSISRTAAKNRKMHXISPQCLYLHHWHKQLVXVXCPHLDWNXKTPAEVMKVQNQENSKELVSRRAESGDSLGSEDRDLLYRSQRFKETERPSIKQVIVRKEDVTSKLDEKNNAFPCQVNIKQKMQELNNEINMQQTVIYQASQALNCCVDEEHGKGSLEEAEAERLLLIATGKRTLLIDELNKLKNEGPQRKNXGXSAPSEFIAIPKDQFTLSEIRLPXKADFVCSTVQKPDAANYYYLIILKSRSENMVATPLASTSNSLNGDALTFTTTFTLQDVSNDFEINIEVYSLVQKKDPSGLDKKKKTSKSKKSNIHSSVMASPGGLSAVRTSNFALVGSYTLSLSSVGNTKFVLDKVPFLSSLEGHIYLKIKCQVNSSVEERGFLGCPGGGRLQPKRQTIFEDVSGFGAWHRRWCVLSGNCISYWTYPDDEKRKNPIGRINLANCTSRQIEPANREFCARRNTFELITVRPQREDDRETLVTNAGTHSVFTKNWLSADTKEERDLWMQKLNQVLCDIRLWQPDACYKPIGKP

SEQ ID NO: 12637 - protein, 23 aa, Homo sapiens
MFIFAFGKSIFKITTTFQSTIVG

SEQ ID NO: 12638 - protein, 127 aa, Homo sapiens
KVQGPHASAHASGEGSLTIIPVTRSPLATMNHIVQTFSPVNSGQPPNYEMLKEEQEGAMLGAPHNPAPPMSTVIHIRSETSVPDHVVWSLFNTLFMNTGCLGLITFVYSVKARDRKMGRRTRPGAQG

SEQ ID NO: 12639 - protein, 107 aa, Homo sapiens
  misc_feature (1)...(107): Xaa = X or * as defined in Table 2
DAVFAGAMPTMASVKLSTLHPIVNHPHYEDADLRPGCSMLEIWDVEDPSNAANPPLRSILLEDARPKMPVFQNSVYRVLKVNXEGNYPLHYGTMPCVKNNHPLAYLH

SEQ ID NO: 12640 - protein, 165 aa, Homo sapiens
  misc_feature (1)...(165): Xaa = X or * as defined in Table 2
SIKLSTLHPIVNHQHYEDADLRARTKIVYSTYSRTSAKEVRDKLLELHVNYYVLEEAWCVVRTKFILQDGPGVLQAAEKXCQMVTQIYKKYSNALEMPGCSMLEIWDVEDPSNAANPPLCSVLLEDARPYFTTVFQNSVYKVLKVNXEDADLRARTKIVYSTYSR

SEQ ID NO: 12641 - protein, 95 aa, Homo sapiens
  DOMAIN (31)..(72): Protein secY proteins domain identified by eMATRIX, accession number BL00755E, p-value=6.175e-25, raw score of 26.66
YYLSPPESMGAIFEDPAHVVVYIIFMLGSCAFFSKTWIEVSGSSAKDVAKQLKEQQMVMRGHRDTSMVHELNRPKVKLRRWKGEGRHFTKRILFY

SEQ ID NO: 12642 - protein, 216 aa, Homo sapiens
  DOMAIN (18)..(37): Protein secY proteins domain identified by eMATRIX, accession number BL00755D, p-value=4.214e-17, raw score of 11.88
  misc_feature (1)...(216): Xaa = X or * as defined in Table 2
RVDLPIKSARYRGQYSSYPIKLFYTSNIPIILQSALVSNLYVISQMLSVRFSGNFLVNLLGQWADVSGGGPARSYPVGGLCYYLSPPESMGAIFEDPVHVVVYIIFMFGSCAFFSKTWIEVSGSSAKDVSXTAXKEQQMVMRGHRDTSMFHELNRYIPTAAAFGGLCIGALSVLADFLGAIGSGTGILLAVTIIYQYFEIFVKEQAEVGGMGALFF

SEQ ID NO: 12643 - protein, 179 aa, Homo sapiens
  misc_feature (1)...(179): Xaa = X or * as defined in Table 2
KFIFRDGGSLCCPSWTXTLGLQQSSHMSLPSDWDSRVRATKPNFPFSSXHSFSALYMHLPRSPLNFIQPCRFYKGPAGLSRGGREXHGLXSDFSVANLWQLGFLWQALTDYRAELPGMDPIISTHLAKLYDNLLEQNLIRVIEPFSRVQVRTLWGLHFWPGILTVATSLPHLSRMGTHF

SEQ ID NO: 12644 - protein, 316 aa, Homo sapiens
  DOMAIN (1)..(28): Protamine P1 proteins domain identified by eMATRIX, accession number BL00048, p-value=4.600e-09, raw score of 6.39
  misc_feature (1)...(316): Xaa = X or * as defined in Table 2
PRVRPRVRPRVRSSRPRSRDPSPRRARLRWQLRWKPRWCPRPPKTPGVWKRPRTRPRSSAGGSTGFPSSPILRRSPSTRRRSSRKASPTATRATGTPPRQAQRKTARAAGRRRASPGIATAGTRSMISMRPGRKPSNPSWEGRTNEETSSLSRLKPVSPGTITCPLRTPGSLLKDSKIPISIKHLTNLPSSHPVVHQQPSRSEMPRTKIPVSKVLVRRVSNRGLAGTTIRATACHDSAQKVVRSSRPRWMGPMPRNTTFPWETTKVSFAFPKESLLWTPPVPRPAPERGPRRSLCPEXGPDNTRKRDATRGFLLSR

SEQ ID NO: 12645 - protein, 93 aa, Homo sapiens
  misc_feature (1)...(93): Xaa = X or * as defined in Table 2
VQWHDLGXPQPPPPGFKRFSCLTPPRSSCDHRCPPPTPDXFLCFLVETGFHYVGQAGLELLTSGDPPTLASQSAGIAGVSHHARPNFLIFFFN

SEQ ID NO: 12646 - protein, 95 aa, Homo sapiens
  misc_feature (1)...(95): Xaa = X or * as defined in Table 2
FLVARVAGSGGDGLTLFPRLECTSVITAPASISWAQGDLPASASQVAQTAGACHHSWPVFTSCVEMGFPCVPXAGLELLGSSPPPQPPKMFRLQA

SEQ ID NO: 12647 - protein, 114 aa, Homo sapiens
  misc_feature (1)...(114): Xaa = X or * as defined in Table 2
SHSVAQIGVQWRDLGSLQPSPPGFKRFSCLSLPSSXDYRHAPVHPANFFFLVEMWLPRVSQDGLDLLTSDLPSSASQSTGITGMSHRARPNFCIFSRDRVSPCWPVWSQTPDLR

SEQ ID NO: 12648 - protein, 102 aa, Homo sapiens
  misc_feature (1)...(102): Xaa = X or * as defined in Table 2
QVLENPHFPRGXAPPPSWXYPSGFYKSNRPRACFNPRSLAPRGPHQGFFFPPGPLFPPPPFLGPPYGSRFFPSEHFQKVQPLNQPPFLSLKNPPXRFPFFFP

SEQ ID NO: 12649 - protein, 73 aa, Homo sapiens
  misc_feature (1)...(73): Xaa = X or * as defined in Table 2
SFLKDIGLFKIIYFFFFFFETGVSFCHPRLECSGETMAHCSLTSLGPGDPPTSASXQAGITGVHHHARLIFFF

SEQ ID NO: 12650 - protein, 140 aa, Homo sapiens
  misc_feature (1)...(140): Xaa = X or * as defined in Table 2
DAWAMNHTVQTFFSPVNSGQPPNYEMLKEEHRVGCAGAAPTTLFPPTSTLIHNRQRDLPCPTHVVWSLFNTLFMNPCCLGFQXEFAYSVKSMDRKMVGDVTGAQAYASTAKCLNIWALILGILMTILLIVIPVLIFQAYG

SEQ ID NO: 12651 - protein, 832 aa, Homo sapiens
  DOMAIN (659)..(672): PROTEIN ZINC-FINGER METAL-BINDI domain identified by eMATRIX, accession number PD00066, p-value=5.846e-15, raw score of 13.92
  DOMAIN (221)..(721): Zinc finger, C2H2 type domain identified by PFam, accession name zf-C2H2, E-value=4.9e-143, PFam score of 488.6
MEDAWGIRKETGRVKEEAEKVTGWGNNWRNVEKSSMSRKVKAARPGFKKLPMTSDIPPKCTIKDLLPKEKSSTEAVFHTVVLERHESPDIEDFSFKEPQKNVHDFECQWRDDTGNYKGVLMAQKEGKRDQRDRRDIENKLMNNQLGVSFHSHLPELQLFQGEGKMYECNQVEKSTNNGSSVSPLQQIPSSVQTHRSKKYHELNHFSLLTQRRKANSCGKPYKCNECGKAFTQNSNLTSHRRIHSGEKPYKCSECGKTFTVRSNLTIHQVIHTGEKPYKCHECGKVFRHNSYLATHRRIHTGEKPYKCNECGKAFRGHSNLTTHQLIHTGEKPFKCNECGKLFTQNSHLISHWRIHTGEKPYKCNECGKAFSVRSSLAIHQTIHTGEKPYKCNECGKVFRYNSYLGRHRRVHTGEKPYKCNECGKAFSMHSNLATHQVIHTGTKPFKCNECSQVFTQNSQLANHRRIHTGEKPYKCNECGKAFSVRSSLTTHQAIHSGEKPYKCIECGKSFTQKSHLRSHRGIHSGEKPYKCNECGKVFAQTSQLARHWRVHTGEKPYKCNDCGRAFSDRSSLTFHQAIHTGEKPYKCHECGKVFRHNSYLATHRRIHTGEKPYKCNECGKAFSMHSNLTTHKVIHTGEKPYKCNQCGKVFIQNSHLANHQRTHTGEKPYRCNECGKAFSVRSSLTTHQAIHTGKKPYKCNECGKVFTQNAHLANHRRIHTGDKPYRCTECGKAFRRQGVTPGPSLECNGTILAYSSLKFVGSSDTHISLLRSQDDRQVLPHLANPNFREGLLPAFLLLCSDSHFLQFCSQFAPRKTQGSGSVNNIQANIIAK

SEQ ID NO: 12652 - protein, 835 aa, Homo sapiens
  DOMAIN (208)..(225): Zinc finger C2H2 type, domain proteins. domain identified by eMATRIX, accession number BL00028, p-value=3.700e-13, raw score of 16.07
  DOMAIN (178)..(732): Zinc finger, C2H2 type domain identified by PFam, accession name zf-C2H2, E-value=7.1e-168, PFam score of 571.1
  misc_feature (1)...(835): Xaa = X or * as defined in Table 2
MPHQLGPNLVPDIPPKCTIKDLLPKEKSSTEAVFHTVVLERHESPDIEDFSFKEPQKNVHDFECQWRDDTGNYKGVLMAQKEGKRDQRDRRDIENKLMNNQLGVSFHSHLPELQLFQGEGKMYECNQVEKSTNNGSSVSPLQQIPSSVQTHRSKKYHELNHFSLLTQRRKANSCGKPYKCNECGKAFTQNSNLTSHRRIHSGEKPYKCSECGKTFTVRSNLTIHQVIHTGEKPYKCHECGKVFRHNSYLATHRRIHTGEKPYKCNECGKAFRGHSNLTTHQLIHTGEKPFKCNECGKLFTQNSHLISHWRIHTGEKPYKCNECGKAFSVRSSLAIHQTIHTGEKPYKCNECGKVFRYNSYLGRHRRVHTGEKPYKCNECGKAFSMHSNLATHQVIHTGTKPFKCNECSKVFTQNSQLANHRRIHTGEKPYKCNECGKAFSVRSSLTTHQAIHSGEKPYKCIECGKSFTQKSHLRSHRGIHSGEKPYKCNECGKVFAQTSQLARHWRVHTGEKPYKCNDCGRAFSDRSSLTFHQAIHTGEKPYKCHECGKVFRHNSYLATHRRIHTGEKPYKCNECGKAFSMHSNLTTHKVIHTGEKPYKCNQCGKVFTQNSHLANHQRTHTGEKPYRCNECGKAFSVRSSLTTHQAIHTGKKPYKCNECGKVFTQNAHLANHRRIHTGEKPYRCTECGKAFRVRSSLTTHMAIHTGEKRYKCNECGKVFRQSSNLASHHRMHTGEKPYKECGEVIRYNSLLSHQLIHSXQNPYKCSDSGQSLMSXSINRYERPXARDYHVNICGRGSIQASQVTRHQDFISLMKRNKCNMHPEAITQXPMVSEDS

SEQ ID NO: 12653 - protein, 119 aa, Homo sapiens
  misc_feature (1)...(119): Xaa = X or * as defined in Table 2
PKKNYFPLHLKGPKTKGVFFYSSSSSSQKGVSLCNPRWNAVGPFGFPSTPPSLVKXFLCPNPWSXCDFRPPSPRPGYFCFFNKNKALLARVVFNSXPQVIPLFQPPKMVGFQGLTPLAG

SEQ ID NO: 12654 - protein, 119 aa, Homo sapiens
  misc_feature (1)...(119): Xaa = X or * as defined in Table 2
FLFLSFPPLSFKMTLNDAMRNKARLSITGSTGENRRVMTPEFPKAVHAVPFTXSPGHGNGMSSVTESLGGLIRTLLSALPQWFSCVFIVQSGERHPSILEDFSFQPKNSLNMWSSILKL

SEQ ID NO: 12655 - protein, 18 aa, Homo sapiens
  misc_feature (1)...(18): Xaa = X or * as defined in Table 2
MGEAKKTGEQRVRLPRTX

SEQ ID NO: 12656 - protein, 210 aa, Homo sapiens
  misc_feature (1)...(210): Xaa = X or * as defined in Table 2
LVSSFFFFFFCRDRVSPCCLGWSPTWSPGLKRSARLGLPQCWDSRRELPRPAYLLFLLSWGSPSPSAWQEGGWCKKKRGTEHPEVPSIPSCTCPSPTVQQXSGEKQVQETGRQSLGEAKKTGVQWHDQGSLQPXSGLKXSSYLSFLSSXDHRCAPTTPDXFLXRXDPTMLPRLVLNSWAQCDHPALASQSTGIIGLSHRAWACDQNSHFF

SEQ ID NO: 12657 - protein, 215 aa, Homo sapiens
  misc_feature (1)...(215): Xaa = X or * as defined in Table 2
RVSSVMSTSLEEIFNCIFDAHVPPLWGKAYPSQKPLAAWTRDLAMRVEQFELWASRARPPVIFWLSGFTFPTGFLTAVLQSSARQNNVSVDSLSWEFIVSTVEXQATXVYPPKDGCWVRGLYLEGAGWDPEELLLGGRQSPCKLVWLMPTIHFRPAESRKKSPKGMYSCPLYYYPNRAGSSDRASFVIGIDLRSGAMTPDHWIKRGTALLMSLDS

SEQ ID NO: 12658 - protein, 70 aa, Homo sapiens
  misc_feature (1)...(70): Xaa = X or * as defined in Table 2
XKLIQFGLMKNLIRRLQKYPVRVTREEQSHPARLYTGCHSYDEICCKTGMSYHELDERLENDPNIIICWK

SEQ ID NO: 12659 - protein, 415 aa, Homo sapiens
  misc_feature (1)...(415): Xaa = X or * as defined in Table 2
TPLREERGATGLGPVIAMGSGCRIECIFFSEFHPTLGPKITYQVPEDFISRELFDTVQVYIITKPELQNKLITVLESSFVSMEESKQKLVPIMTILLEELNASGRCTLPIDESNTIHLKVIEQRPDPPVAQEYDVPVFTKDKEDFFNSQWDLTTQQILPYIDGFRHIQKISAEADVELNLVRIAIQNLLYYGVVTLVSILQYSNVYCPTPKVQDLVDDKSLQEACLSYVTKQGHKRASLRDVFQLYCSLSPGTTVRDLIGRHPQQLQHVDERSEENLLGHLGVTXGKLDPLCLSGALDHGALPIQAGFLEMMGYRDKIEGRLQERVGLPERRPGQGVTPSSDPHPRKLIQFGLMKNLIRRLQKYPVRVTREEQSHPARLYTGCHSYDEICCKTGMSYHELDERLENDPNIIICWK

SEQ ID NO: 12660 - protein, 169 aa, Homo sapiens
  misc_feature (1)...(169): Xaa = X or * as defined in Table 2
CTLPIDESNTIHXKVIEQRQTPRVAQEYDVLVFTKDKEDFFNSQWDLTTQQILPYIDGFRHIRKISAEADVELNLVRIAIQNLLYYGVVTLVSILQYSNVYCPTPKVQDLVDDKSLQEACLSYVTKQGHKRASLRDVFQYDEICCKTGMSYHELDERLENDPNIIICWK

SEQ ID NO: 12661 - protein, 231 aa, Homo sapiens
SSGICSALIWPWPALHLTNARKRKLLRKRNYWRKGEGSLRTIPVTRSPLVTMNHIVQTFSPVNSGQAPNYEMLKEEQEVAMLGAPQKPCLPECPPVIHIRSETSVPDHVVWSLFNTLFMNTCCRLGFIAFAYSSEVSGTRKMVGEVTRAQGLLPPPPKCLNIWALILGIFMNQFLLINHPPPSVGSSRPSDRSGRHHLRPRELCPVEPVSQVKNSIFHSLALPPEARKFCP

SEQ ID NO: 12662 - protein, 157 aa, Homo sapiens
HTIHLKVIEQRPDPPVAQEYDVPVFTKDKEDFFNSQWDLTTQQILPYIDGFRHIEKISAEADVELNLVRIAIQNLLYYGVVTLVSILRKLIQFGLMKNLIRRLQKYPVRVTREEQSHPARLYTGCHSYDEMCCKTGMSYHELDERLENDPNIIICWK

SEQ ID NO: 12663 - protein, 119 aa, Homo sapiens
  misc_feature (1)...(119): Xaa = X or * as defined in Table 2
KESPGPGRHPVPLIPHPXESXIPVRALXKNLIQATYRKYPVRVTREERAHPARLYTGCHSYDEICLQDRWRQAGSQGGFRAGCARPRPLTSPPPPHPGMSYHELDERLENDPNIIICWK

SEQ ID NO: 12664 - protein, 402 aa, Homo sapiens
EFGTRPLREERGATGLGPVIAMGSGCRIECIFFSEFHPTLGPKITYQVPEDFISRELFDTVQVYIITKPELQNKLITVTAMEKKLIGCPVCIEHKKYSRNALLFNLGFVCDAQAKTCALEPIVKKLAGYLTTLELESSFVSMEESKQKLVPIMTILLEELNASGRCTLPIDESNTIHLKVIEQRPDPPVAQEYDVPVFTKDKEDFFNSQWDLTTQQILPYIDGFRHIQKISAEADVELNWVRIAIQNLLYYGVVTLVSILQYSNVYCPTPKVQDLVDDKSLQEACLSYVPKQGHKRASLRDVFQLYCSLSPGTTVRDLIGRPPPSSCQHVDERKLIQFGLMKNLIRRLQKYPVRVTREERAHPARLYTGCHSYDEICCKTGMSYHELDERLENDPNIIICWK

SEQ ID NO: 12665 - protein, 104 aa, Homo sapiens
  misc_feature (1)...(104): Xaa = X or * as defined in Table 2
FETESYSVAQAGVQWWDLGSLQPPPPGFKRFSCLSLLSSWDYRRPPPRLANFXFLVETGFHHVGQAGLDLLTSGDPLASASQSAGITGLSHCAWQTTYITFNHK

SEQ ID NO: 12666 - protein, 141 aa, Homo sapiens
  misc_feature (1)...(141): Xaa = X or * as defined in Table 2
SVLGLISDTSNTFLSFFFFFEMESHSLAQAPLQWHYLGSLQAPPPCKLRLPGSRHSPASASRVAGTTGARHHARLIFGFLVEAGCHRVSQDSLDLLTSXSTCLKPAQSAGITRREPPTPGLFFFLKMESCSVGPRLGVQSW

SEQ ID NO: 12667 - protein, 121 aa, Homo sapiens
  misc_feature (1)...(121): Xaa = X or * as defined in Table 2
LLNSRPVDFFFFFFFLSHSLDSVVQAGVQWHNLGSRLLQSPPPGSMPFSCLSLLSSWDYRHPPPYLANFFFFCIFSRDMGFTMLARMVSISXPCDLPALGSQSAGITGVSHHAWPAYFYPQ

SEQ ID NO: 12668 - protein, 42 aa, Homo sapiens
  misc_feature (1)...(42): Xaa = X or * as defined in Table 2
MPEQICPLETSQSXINNLPKKFFFMSIXCPGFERSYFFFXCC

SEQ ID NO: 12669 - protein, 140 aa, Homo sapiens
  DOMAIN (2)..(28): Serine carboxypeptidases serine proteins. domain identified by eMATRIX, accession number BL00131F, p-value=3.045e-22, raw score of 17.66
  DOMAIN (1)..(135): Serine carboxypeptidase domain identified by PFam, accession name serine_carbpept, E-value=1.6e-18, PFam score of 70.6
  misc_feature (1)...(140): Xaa = X or * as defined in Table 2
KYQILLYNGDVDMACNFMGDEWFVDSLNQKGKVEIPGPGIEPAGEEWGAGMPGSGQLAAWLWAHRGQVWRNSQPXGLAGSCEQGCSCCRLMSFLVGQMEVQRRPWLVKYGDSGEQIAGFVKEFSHIAFLTIKVGTGPAER

SEQ ID NO: 12670 - protein, 251 aa, Homo sapiens
  DOMAIN (210)..(247): Serine carboxypeptidases serine proteins. domain identified by eMATRIX, accession number BL00131G, p-value=6.727e-30, raw score of 29.13
  DOMAIN (1)..(251): Serine carboxypeptidase domain identified by PFam, accession name serine_carbpept, E-value=7.7e-95, PFam score of 328.5
NRLWSSLQTHCCSQNKCNFYDNKDLECVTNLQEVARIVGNSGLNIYNLYAPCAGGVPSHFRYEKDTVVVQDLGNIFTRLPLKRMWHQALLRSGDKVRMDPPCTNTTAASTYLTNPYVRKALNIPEQLPQWDMCNFLVNLQYRVFLPSQNSRYLKLLSSQKYQILLYNGDVDMACNFMGDEWFVDSLNQKMEVQRRPWLVKYGDSGEQIAGFVKEFSHIAFLTIKGAGHMVPTDKPLAAFTMFSRFLNKQPY

SEQ ID NO: 12671 - protein, 93 aa, Homo sapiens
  DOMAIN (37)..(80): KERATIN FEATHER FIBROUS PROTEIN MULTIGEN domain identified by eMATRIX, accession number PD02451, p-value=7.439e-09, raw score of 6.90
  misc_feature (1)...(93): Xaa = X or * as defined in Table 2
FLRDVILLCHPGQSVVVXSXLTVSPTELPGSSDPPSSAFNCSWEYRCVTPCQLMFXFTLLSIGIGSTLPRPVLNSSPQVILAPWPPKVLRLQE

SEQ ID NO: 12672 - protein, 176 aa, Homo sapiens
MTTDNLSDTLKKLKITAVDKTEDSLEGCLDCLLQALAQNILFTSDFLISEFKMGRKAAETTSNINNALGPGTANEHTVQWWLKKFCKGDESLDEEDCDVQQEVDFIWQLKSGFYTTGDDQFSDWTKKLQSTSQSQTCTKKRSWSLSGGLLLIHYSFLNPGETIKSEKYAQQIDEMH

SEQ ID NO: 12673 - protein, 347 aa, Homo sapiens
  DOMAIN (156)..(194): Lysyl oxidase  copper-binding region proteins domain identified by eMATRIX, accession number BL00926B, p-value=7.840e- 10, raw score of 13.84
  misc_feature (1)...(347): Xaa = X or * as defined in Table 2
CPSRPCRRRPPPPRGPKPRASYPGGPAPPGDKKKRPPQGPRGSSPAPGPPPPQEAAGPARPRPGQDAAAGPSGRPPQALPSPRGPQPRAPRPGRQAPATAQRGPPMRRPRRGRGPPPRAPPPGAGPCPRLRCALLPESHPRGRPGHPEASSGEAAAGAAPQALPLTLGRTQAPTRPVSPGXGRGPAEGRPRQRPPTHPPPPAGPPRASARRPAAARRPAGSPAQPAARGPAADAQGVAAQRAAQVRRRGVRGGARGGGRGPRGPRGRPPGSSGRQRPLSGPSAQAGPRGAQPDSPDGHGPPPALASRQPGPFSFTPVVSTPDACLCPHSGLLLASPSIHAVRGELSN

SEQ ID NO: 12674 - protein, 39 aa, Homo sapiens
SYWLFTLPGCKPLQGRGLSRVQCCIPAAGHGTWSMAFNK

SEQ ID NO: 12675 - protein, 191 aa, Homo sapiens
  misc_feature (1)...(191): Xaa = X or * as defined in Table 2
ILGFPFFVRWGSHTVAQAGVQWCDHGSLQPRSPGVKXSSHLSLLGSWNHRHATTTPGXFCFFSRIRSHCVAQAGLXLLTSNHPPALASQTVGITGVSHWTWPNTGFSVLTATNKNLKFFHYAISKCLVRAKLSSRLLKIEERNKALSAPVVSVSIFDRVLRLLGYSASDWQPEFVETAVSNFVIYGIFRGQ

SEQ ID NO: 12676 - protein, 243 aa, Homo sapiens
  DOMAIN (68)..(83): WILM'S TUMOUR PROTEIN SIGNATURE domain identified by eMATRIX, accession number PR00049D, p-value=4.356e-09, raw score of 0.00
  misc_feature (1)...(243): Xaa = X or * as defined in Table 2
ESHLQNDTAAHPLLNGTECGVSPPPLTSRQGKVRRRTQSSTSRTCSPVIPKQTFPQPVLHMSAGVALDSPAPPPRPWQPPPQGFAHTXDRKEEGDPIGIWAPEGKSCTPKPPPPSLPRTSPGWKRALQKGDTGCPGPSTASTPHPLILGPSQAPPKPKPPPSPGVPACAPSYPALPAPSISLTEKEQARAPGGQDGAGHTVGGGGAAGRREGQNKTFSFGFFFSFFFLPFTLWVVLLFLSFSL

SEQ ID NO: 12677 - protein, 58 aa, Homo sapiens
  misc_feature (1)...(58): Xaa = X or * as defined in Table 2
FLGPSKFPPPGFPPFFPPPPRERGNQRSSSPPSSSSPPSQKKTGVPPGXPGGFFPPPP

SEQ ID NO: 12678 - protein, 130 aa, Homo sapiens
  misc_feature (1)...(130): Xaa = X or * as defined in Table 2
LILNTKRPAFIFDLLHNLDPKEQAYADLVSAYTLNSMFWLYLATQGVNPTDHPVKHELDTTRACMNRSSSPTDKKKAGLLYRGAASKFVKNALWEPKSKNAXKVGNKGKSPTSLFGFDVHIFKKNMLPPP

SEQ ID NO: 12679 - protein, 516 aa, Homo sapiens
  DOMAIN (325)..(360): Matrix protein (MA) p15. domain identified by eMATRIX, accession number PF01140D, p-value=7.907e-09, raw score of 15.54
MPERDSEPFSNPLAPDGHDVDDPHSFHQSKLTNEDFRKLLMTPRAAPTSAPPSKSRHHEMPREYNEDEDPAARRRKKKSYYAKLRQQEIERERELAEKYRGRAKERRDGVNKDYEETELINTTANYRAVGPTTKADKSAAEKRRQLIQESKFLGGDMEHTHLVKGLDFALLQKVRAEIASKEKEEEELMEKPQKETKKDEDPENKIEFKTRLGRNVYRVLFKNKAYKRNELFLPGRMAYVKVDCPTMEAQTILTTNDIVISKLTQLLSYLRQGTRNKKLKKKDKGKLEEKKPAEADRSIFEDIGDYTPSTIKTPWDKERERYRERERDQRDRDRDRERERERDQERERDRERERDRERGPGSAKELIKSINEKFAGSAGWEGTESLKIAEDKKQLRDFFGMSNSYAECYPATMDDMAVDSDEEVDYSKMDQGNKKRTLSRWDFDTQEDYSEYMNNKEALPKAAFQYGIKMSEGRKTRRFKETNDKAALDCQWKISAIIEKRKKMEADGVEVKRPKY

SEQ ID NO: 12680 - protein, 1054 aa, Homo sapiens
  DOMAIN (760)..(792): Vpu protein domain identified by eMATRIX, accession number PF00558, p-value=7.309e-10, raw score of 10.60
MEQFLWQELFAEYNRQASAQVDLGEDRTEYYDQFCKDVPPKNEETEEVLVNNGPTWSARTVDSHLGQKDLSRLQKVFVDGFGSSDLQSIFFSSLNIQLTDATQKEPLCKKIATLHSESKLNSFEKDYYYIGASRNLGCSAKIDEGLLSKVYSSLNSELGSSQEIFYRVVTHKVLGVEINEATQEKLVKRLQELLKKDDTLSGLGYAFNVAPLLGASASFIANRVEDAIVQADEVDGKLLQFEGGLSITSLIINGAFGVSKTFNKPVPITADQAVKFANYFLSRRSVQTAKGAHVLIEALKTISGADKIAPVCVQLIGNGQLDAQSPTLNVAVVDLLGKPLSPAPKVINAKVIRKKDSSVLADKITVASKSSDKTTYVADLASLKPARGVYQAELSADGVYTQTLQFKVLGRVKVQSLEVGIAESDASAATRKQSVTYPGKLQEVLSADSTQKLLLKAVLVDESTSKPLAVHQAFVRLYNKKTDKEIIFVAEQDSSKAYKFDMDVGNNGKNFNYQSGTYSIYLTVGDSSLSNSFEWLVAEVQLKFNEDKEVKPKNTSGPLPEIIHQFRVPDKRPPRIVSDIFTGLCITPLVLLFVFWGKLGINVSNLTLAPSTIGFHLGFGGILVLFFVFWLQLNMFQTLRLLIPIAVFTFLAGNRLLRRLYAQRNSKASASYNTDVLEQELKEIKECAQTTLTTNDIVISKLTQILSYLRQGTRNKKLKKKDKGKLEEKKPPEADMNIFEDIGDYVPSTTKTPRDKERERYRERERDRERDRDRDRERERERDRERERERDREREEEKKRHSYFEKPKVDDEPMDVDKGPGSTKELIKSINEKFAGMDDMAVDSDEEVDYSKMDQGNKKGPLGRWDFDTQEEYSEYMNNKEALPKAAFQYGIKMSEGRKTRRFKETNDKAELDRQWKKISAIIEKRKKMEADGTLAWCSSLGVTTASWLDATLPLSTLSPRFVASPDPRKLESHLSHYLVFDYIHLVLLSMDRTCEERPAEDGSDEEDPDSMEAPTRIRDTPEDIVLEAPASGLAFHPARDLLAAGDVDGDVFV

SEQ ID NO: 12681 - protein, 35 aa, Homo sapiens
QRKNDNKMPERDSEPFSNPLAPDGHDVDDPHSFHQ

SEQ ID NO: 12682 - protein, 575 aa, Homo sapiens
  DOMAIN (374)..(409): Troponin domain identified by eMATRIX, accession number PF00992A, p-value=8.225e-10, raw score of 16.67
  misc_feature (1)...(575): Xaa = X or * as defined in Table 2
MPERDSEPFSNPLAPDGHDVDDPHSFHQSKLTNEDFRKLLMTPRAAPTSAPPSKSRHHEMPREYNEDEDPAARRRKKKSYYAKLRQQEIERERELAEKYRGRAKERRDGVNKDYEETELINTTANYRAVGPTTKADKSAAEKRRQLIQESKFLGGDMEHTHLVKGLDFALLQKVRAEIASKEKEEEELMEKPQKETKKDEDPENKIEFKTRLGRNVYRVLFKNKAYKRNELFLPGRMAYVKVDCPTMEAQTILTTNDIVISKLTQLLSYLRQGTRNKKLKKKDKGKLEEKKPAEADMKYVSXPLASDQREGVCTFLVSGILGRCXHENLEKWSGGVKVYVXIWPASDLHFPSIFEDIGDYVPSTTKTPRDKERERYRERERDRERDRDRDRERERERDRXHERERDREREEEKKRHSYFEKPKVILLGPWTFDKGPGSTKELIKSFIEKFAGSAGWEATESLKKPEDKKQLGDFLGMSNSYSECYPATMDDMAVDSDEEVDYSKMDQGNQEGGPXARWDLXFPQEEYKRVFVTTKEALPRVAFQYGIKMSEGRKTRRFKEPQXPKQSLIRQWKKI

SEQ ID NO: 12683 - protein, 559 aa, Homo sapiens
  DOMAIN (77)..(475): Armadillo/beta-catenin-like repeats domain identified by PFam, accession name Armadillo_seg, E-value=1.9e-27, PFam score of 104.6
MDNLSDTLKKLKITAVDKTEDSLEGCLDCLLQALAQNNTETSEKIQASGILQLFASLLTPQSSCKAKVANIIAEVAKNEFMRIPCVDAGLISPLVQLLNSKDQEVLLQTGRALGNICYDSHSLQAQLINMGVIPTLVKLLGIHCQNAALTEMCLVAFGNLAELESSKEQFASTNIAEELVKLFKKQIEHDKREMIFEVLAPLAENDAIKLQLVEAGLVECLLEIVQQKVDSEKEGGITELKTGSDLMVVLLLGDESMQKLFEGGKGSVFQRVLSWIPSNNHQLQLAGALAIANFARNDANCIHMVDNGIVEKLMDLLGRHVEDGNVTVQHAALSALRNLAIPVINKAKMLSAGVTEAVLKFLKSEMPPVQFKLLGTLRMLIDAQAEAAEPIGERMLKLVERLVGWCEAKDHAGVMGEQNRLLSALIRHSKSKDVIKTIVQSGGIKHLVTMATSEHVIMQNEALVALALIAALELGTAEKDLESAKLVQILHRLLADERSAPEIKYNSMVLICALMGSECLHKEVQDLAFLDVVSKLRSHENKSVRQQASLTEQRLTVES

SEQ ID NO: 12684 - protein, 151 aa, Homo sapiens
  DOMAIN (40)..(123): gag gene protein p24 domain identified by PFam, accession name gag_p24, E-value=1.3e-25, PFam score of 98.5
YNCRPTLGVSGCAGLDAQVVCQDCAFELGKKPPSGGEQYPSSSAIKQGPKEPYADFIARLQESLKKVIADLAAQDIVLWLLAFDNANPECQAALRPIRGKAHLVDYTKVCDGIRDKLHKATLLAQAMAGLRMGKGNTPFPGACFNCGKHGH

SEQ ID NO: 12685 - protein, 180 aa, Homo sapiens
  DOMAIN (111)..(180): gag gene protein p24 domain identified by PFam, accession name gag_p24, E-value=3.4e-10, PFam score of 42.8
MGQVWALVRSTLELFHTDDEEEGEYDEVTEEVTEQVYLPAKAKVAQEEEVHPYPSAPPHYYFEEKEWPDPPDLSFLEDTGRKVVAPVTEQHLERLLSVLFRQEFSRLDERGPKELYADFIAWNLLRQESLKKVISDSAAQDIVLQLLAFGNVNLDCQAALRPIRGKAHLVDYIKACDGIG

SEQ ID NO: 12686 - protein, 98 aa, Homo sapiens
SESMTPVCICTPFKFKLDLPRSNPIVPAGKGPQTPVGTFCRGSPGRRLTAFVQHKSTTALPAVAGDRHCPGVREWPEPEMLPFGMGPEIGFPSLSKLE

SEQ ID NO: 12687 - protein, 23 aa, Homo sapiens
  misc_feature (1)...(23): Xaa = X or * as defined in Table 2
RMGPRTGPXVFPETGFPPLSNLE

SEQ ID NO: 12688 - protein, 59 aa, Homo sapiens
  misc_feature (1)...(59): Xaa = X or * as defined in Table 2
CTVTPPPQDTGQSKSXSTRVSSSLVPRSPTVAPVTLRPGFEPPXWTPLAKTSSVLTQWC

SEQ ID NO: 12689 - protein, 20 aa, Homo sapiens
PVVHLNQPSRRPPKAGLQLY

SEQ ID NO: 12690 - protein, 71 aa, Homo sapiens
SESMTPVCTCIPFKFKLDLPRRNPIVPAGKGPQTPVGTFCGGSPGRRLTAFVQHKSTVALLAVMGTDIVQG

SEQ ID NO: 12691 - protein, 310 aa, Homo sapiens
  misc_feature (1)...(310): Xaa = X or * as defined in Table 2
QPKAEHAALNLRKTFQHASHTPPFSAQQXNPHRPHQPWLXHALVQHCSCSDMQRPSASGPXPPGTFSRWSSCKMPVPPPAQVPKSLCGVLSSSCXPGRRSPGPAEPPSRACRPCRQDSGPAQAGGPCRQDSGPDPAGGPRDKXASQPGLPAGERAIPAGGPCRQDRGQPRLASSAGGHCRQLRGPTPAGGPCRLPQRAAPAGGPCRQDSEQLRLAGPAGRLAGRHGRRSPGPAEPPSRACRQESGPAQAGGPCRQHSGPDPAGGPRGQLSLPAGPARRRAGNPGRQPLQTGQRAAEAGEPAFATAVSGRD

SEQ ID NO: 12692 - protein, 255 aa, Homo sapiens
  DOMAIN (111)..(217): gag gene protein p24 domain identified by PFam, accession name gag_p24, E-value=1.7e-17, PFam score of 70.0
MGQVWALVRSTLELFHTDDEEEGEYDEVTEEVTEQVYLPAKAKVAQEEEVHPYPSAPPHYYFEEKEWPDPPDLSFLEDTGRKVVAPVTEQHLERLLSVLFRQEFSRLDERDDAVEQLRGVCIRAWEKITSGGEQYPSFSAVKQGPKELYADFIAWNLLRQESLKKVISDSAAQDIVLQLLAFGNVNLDCQAALRPIRGKAHLVDYIKACDGIGAKQDSERFAFTIPVVNNLQPAKHFHYFTDGSSNGKASYSGSK

SEQ ID NO: 12693 - protein, 368 aa, Homo sapiens
  DOMAIN (175)..(303): gag gene protein p24 domain identified by PFam, accession name gag_p24, E-value=8.3e-35, PFam score of 129.1
WLRRTPTVTSNTRLTQPPTWGQIKKLSQMAEENLRKAGQPVTMNNLMVAMIVVITTTEEQEYSEVTEEVTEQVYLPAKAKVAKEGEVHPYPSAPPHYYFEENDPPNLSFPEDTGRKVVAPVTVRAAPRGTALSSIQAGIQQARQEGDLEAWQFPVRIHPPDQQGNIIATFEPFPFKLLKEFKQAISQYGPGSPFVMGLLKNVTVSSQKIPTDWDTLTRACLTPAQFLQFKTCAMKQGPREPYVDFIARLQESLKKMIADSAAQEIVLQLLAFDNAHPDCQAALRPIRGKAHLVDYVKACDGIGEYTPSTYEKKVNCKTASCRSFRRYPEEGIVITGDDSSMRVVVPEDLPVGQDVEVEDRDIDDPDPV

SEQ ID NO: 12694 - protein, 300 aa, Homo sapiens
  DOMAIN (128)..(264): Armadillo/beta-catenin-like repeats domain identified by PFam, accession name Armadillo_seg, E-value=3e-11, PFam score of 50.8
GRPPRVPPWLRERRRLEGGHRAAPPAPYDLRLAPPVPHPRGATWQIILSDTLKKLKITAVDKTEDSLEGCLDCLLQALAQNNTANKCKKSKQVAILQLFASLLTPQSSCKAKVANIIAEVAKNEFMRIPCVDAGLISPLVQLLNSKDQKVLLQTGRALGNICYDSHEGRSAVDQEGGAQIVIDHLRSLCSITDPANEKLLTVFCGMLMNYSNENDSLQAQLINMGVIPTLVKLLGMHCQNAALTEMCLVAFGNLAELDAIKLQLVEAGLVECLLEIVQQKVDSDKEDDITELKTGSDLMV

SEQ ID NO: 12695 - protein, 61 aa, Homo sapiens
  misc_feature (1)...(61): Xaa = X or * as defined in Table 2
MGQVWGLVHFTLELFQTDDEEEQEYNKVTEEVTEHVYLPAXPDVHLNQPSHQPPKAGLQLY

SEQ ID NO: 12696 - protein, 20 aa, Homo sapiens
PFVHLNQPNCQPPKVGLQLY

SEQ ID NO: 12697 - protein, 15 aa, Homo sapiens
AVLWHHPAGGPWLAK

SEQ ID NO: 12698 - protein, 257 aa, Homo sapiens
  misc_feature (1)...(257): Xaa = X or * as defined in Table 2
IVRSLSRTAQKIRSGCPCQSWXRRGRPVGSPSQSTEGPGQVRLRTXPLPFHTHPEGGPGAGRRSRSSLERPTSQPHRSQSGRCPAAPATPLPSPGPQAPLGAPFERGPRSRSAQGAPGTGVRFFSMAQPFPPCSTSQPLKPCSPQELKMRLRPKGAPDSSAPGRTAGTPPCLRCWAGSVEPLRRVRGPRRCGRGPAAAATQWARPLCRARRGTLGGIAXPRSVAARGSAPAPAAPGAARPGPGMGPPAAVAAIAGRP

SEQ ID NO: 12699 - protein, 203 aa, Homo sapiens
  DOMAIN (115)..(135): VASOPRESSIN V2 RECEPTOR SIGNATURE domain identified by eMATRIX, accession number PR00898F, p-value=2.886e-09, raw score of 9.10
  misc_feature (1)...(203): Xaa = X or * as defined in Table 2
SLPPRASRLPPGPSFSGWSPGDNRKLPNTPPPPRAGPRPPSRAPPAXTPGPPSAGSWPXPPGTGSAPRGPAPSAPGARRPGRPGCPPAPAGRPRVPTAGAGACSAASRPGTRPRCTRPGAPRSRRRGGCPGPGAXPGARRPPRPRPPATRAPRSPRSPRGAAPPPTPRTARGAAARELRVQRGPAPLHAPQQHTPAAIVPYKM

SEQ ID NO: 12700 - protein, 12 aa, Homo sapiens
HEEPPSSSNSPK

SEQ ID NO: 12701 - protein, 53 aa, Homo sapiens
  misc_feature (1)...(53): Xaa = X or * as defined in Table 2
SMQQTLLLSYFXKLPXPPQPSATMTQISQQPSTSRQDPPPTKRLXLVEGSNNH

SEQ ID NO: 12702 - protein, 41 aa, Homo sapiens
  misc_feature (1)...(41): Xaa = X or * as defined in Table 2
LHPHILPIDKLLHQXKVVSVSEYRQNQEVPLYSISSNLVHS

SEQ ID NO: 12703 - protein, 54 aa, Homo sapiens
MNSMIQICQDRAEIISSYCNLKIHQRLQNLLISFLQSLKKLKNVNLSFINKNLK

SEQ ID NO: 12704 - protein, 52 aa, Homo sapiens [sequence omitted]

SEQ ID NO: 12705 - protein, 120 aa, Homo sapiens
DRVSLCCPRLECSGMISAHCNLPSPGFKQFSCLSLPNGWAYRSVPPCPANFCVFSVETGFHHVGQAGLELLTSGDLPALASEKCWDYRREHTARGPVTKPSYFQVLFFRLHPIFINHLNT

SEQ ID NO: 12706 - protein, 524 aa, Homo sapiens
  DOMAIN (45)..(55): GTP-BINDING ELONGATION FACTOR SIGNATURE domain identified by eMATRIX, accession number PR00315E, p-value=7.500e-10, raw score of 12.29
  DOMAIN (7)..(256): Elongation factor Tu family domain identified by PFam, accession name GTP_EFTU, E-value=6.5e-27, PFam score of 93.3
  misc_feature (1)...(524): Xaa = X or * as defined in Table 2
AMLGTRVERCLRVLDGAVAEFDASAGVEAQTLTVWRQADKHNIPRICFLNKMDKTGANFKYAVESIREKLKAKPLLLQLPIGEAKTFKGVVDVVMKEKLLWELQFKXWEKTLRRKAPLGKXMIPEFAGRETTXRKECLXLEQVADLDDEFADLVLEEFCENFDLLPAEKLQTAIHRVTLAQTAVPVLCGSALKNKGIQPLLDAVTMYLPSPEERNYEFLQWYKDDLCALAFKVLHDKQRGPLVFMRIYSGTIKPQLAIHNINGNCTDRTQIALSVNNHEVHIYKKNGRQCVKAHELKEHNGHITDIDWAPKHDHIVTCGADHNAYVWSQKDGVWKPTLMILRINRTATFVKWSALENKFAVGSEARLISVCYFESENDWWVSKHIKKLIRSTVLSLDWHPNNVLLAAGSCDFKHRVFSSYIKEVDEKLASMPWDSKMLFGQLMSESGGGGTGGWVHGLDIPKQSIQRNMSAMECFCNTDKRATTEGSNMALKMLRQNSITQVSIYEVDEKDCRKYCTTGIDGEP

SEQ ID NO: 12707 - protein, 50 aa, Homo sapiens
  misc_feature (1)...(50): Xaa = X or * as defined in Table 2
RTLNLLKAMASRVLRIILTGRXCLDVSIKIPLXENLGESIMVDSLMVKVP

SEQ ID NO: 12708 - protein, 616 aa, Homo sapiens
  DOMAIN (398)..(562): Elongation factor G C-terminus domain identified by PFam, accession name EFG_C, E-value=7.5e-21, PFam score of 82.7
  misc_feature (1)...(616): Xaa = X or * as defined in Table 2
MALKKADKQVLEPLMNLEVTVARDYLSPVLADLAQRRGNIQEIQTRQDNKVVIGFVPLAEIMVADLDDEFADLVLEEFSENFDLLPAEKLQTAIHKSDTKLRQQLPVLCGSALKNKGIQPLLDAVTMYLPSPEELXPMEFLQWYKDDLCALAFKVLHDKQRGPTGFYAPFNSRPLXKPQLAHSIILMETATERISRLLLPFADQHVEIPSLTAGNIALTVGLKHTATGDTIVSSKSSALLQLVEPNGREKRSTDKTMKAERLLLAGSGRFQEPVFFCTIGTPITVXGSQIWEHAFEMSFSVRIPVLKVRLDPDSGQTVLCGMGELHIEIIHDRIKREYGLETYLGPLQVAYRETILNSVRATDTLDRTLGDKRHLVTVEVEARPIETSSVMPVIEFEYAESINEGLLKVSQEAIENGIHSACLQGPLLGSPIQDVGNYLYIPXQIHPWAPSTTYDFCLCLKMPCKKALERKADKQVLEPLMNLEVTVARDYLSPVLADLAQRRGNIQEIQTRQDNKVVIGFVPLAEIMGYSTVLRTLTSGSATFALELSTYQAHESSRSKYTAQPEKWFDLNVLVFGRGNSGRHPRLLHFSVRNNFYCLYLLGRNKGTVSGTFRGT

SEQ ID NO: 12709 - protein, 165 aa, Homo sapiens
  DOMAIN (12)..(25): 0 kw ZK63212 YDR313C ENDOSOMAL III. domain identified by eMATRIX, accession number DM01970B, p-value=4.508e-15, raw score of 8.60
  DOMAIN (4)..(54): FYVE zinc finger domain identified by PFam, accession name FYVE, E-value=7.9e-19, PFam score of 71.8
  misc_feature (1)...(165): Xaa = X or * as defined in Table 2
RCQKAKFTPVNRRHHCRKCGFVVCGPCSEKRFLLPSQSSKPVRICDFCYDLLSAGDMATCQPARSDSYSQSLKSPLNDMSDDDDDDDMTVTKDTFGSIXSGEALXEINFGGNARLXALSLDCSTMNLPEKLGTYVPQYIPXKEGAPAFCHSSHSSTGIGFCKYIR

SEQ ID NO: 12710 - protein, 55 aa, Homo sapiens
  misc_feature (1)...(55): Xaa = X or * as defined in Table 2
LIPQPWGQHLPLPPNISNYDXRPQKFLGLPHPCSFGGRALTPHWSTGLRLTPSAQ

SEQ ID NO: 12711 - protein, 134 aa, Homo sapiens
  DOMAIN (21)..(39): Glutathione peroxidases selenocysteine proteins domain identified by eMATRIX, accession number BL00460B, p-value=4.600e- 23, raw score of 9.73
  DOMAIN (8)..(81): Glutathione peroxidases domain identified by PFam, accession name GSHPx, E-value=1.6e-43, PFam score of 158.0
  misc_feature (1)...(134): Xaa = X or * as defined in Table 2
XPGTREVEELNALQEELAPFGLVILGFPCNQFGKQEPGENSEILPTLKYVRPGGGFVPNFQLFEKGDVNGEKEQKFYTFLKNSCPPTSELLGTSDRLFWEPQESSRHPLELWKFLVGQMDTHHALHHRPRQQRR

SEQ ID NO: 12712 - protein, 53 aa, Homo sapiens
MCLSGNVYHLCACSCVVPGQCTTLSLQFSTPMIIVHLHLNPKEKPALGPIVLL

SEQ ID NO: 12713 - protein, 601 aa, Homo sapiens
  DOMAIN (75)..(93): Glutathione peroxidases selenocysteine proteins domain identified by eMATRIX, accession number BL00460B, p-value=4.600e- 23, raw score of 9.73
  DOMAIN (39)..(135): Glutathione peroxidases domain identified by PFam, accession name GSHPx, E-value=2.2e-51, PFam score of 184.1
MARLLQASCLLSLLLAGFVSQSRGQEKSKMDCHGGISGTIYEYGALTIDGEEYIPFKQYAGKYVLFVNEELAPFGLVILGFPCNQFGKQEPGENSEILPTLKYVRPGGGFVPNFQLFEKGDVNGEKEQKFYTFLKNSCPPTSELLGTSDRLFWEPMKVHDIRWNFEKFLVGPDGIPIMRWHHRTTVSNVKMDILSYMRRQAALGVKRKKVTSQYQDRDNKFQNVERIPLSGSHRTVCMMGVKGKVKTQAKPLSGEESLELEQSGLAMAAGADNHFLAEVPAKAVALVLTTTESQQGLQEVSGGVTLAEAESRALGPLPREDGNLMLHLQRLETTLSEPDHGQLFTHLGRMALEFNRLASKVHKNEQRTSILQEYKDVQSTLLPQEVPSQMGNARTSQTHAVPGGKPRRGPYRIYDPGGSVPSGEASAAFERLVKENSRLKEKMQGIKMLGELLEESQMEATRLRQKAEELVKDNELLPPPSPSLGSFDPLAELTGKDSNVTASPTAPACPSDKPAPVQKPPSSGTSSEFEVVTPEEQNSPESSSHANAMASFHSLGKSLARRGKEQRPSLTVASRLQRNGGRAGRGHKEEGVGEDKEEVVP

SEQ ID NO: 12714 - protein, 310 aa, Homo sapiens
  DOMAIN (123)..(141): Glutathione peroxidases selenocysteine proteins domain identified by eMATRIX, accession number BL00460B, p-value=4.600e- 23, raw score of 9.73
  DOMAIN (70)..(198): Glutathione peroxidases domain identified by PFam, accession name GSHPx, E-value=2.8e-21, PFam score of 80.6
  misc_feature (1)...(310): Xaa = X or * as defined in Table 2
KVAGSAGHLRRTVARDQAAAQRDPECAPTPSLARLLQASCLLSLLLAGFVSQSRGQEKSKMDCHGGISGTIYEYGALTIDGEEYIPFKQYAGKYVLFVNVASYXGLTGHVHLNXTALQEELAPFGLVILGFPCNQFGKQEPGENFRRSFPNPSRYGPTKVGGFCSLNFPALLRKGDVNGEKEQKFYTFLKNSCPPTSELLGTSDRLFWEPMKVHDIRWNFEKFLVGPDGIPIMRWHHRTTVSNVKMDILSYMRRQAALGGXRVGCPPFSFKILYFPSRVYSLGGGWSILFPPQNKGSFPKFPSRFLLGPP

SEQ ID NO: 12715 - protein, 74 aa, Homo sapiens
MLLPLPPSPSPSTALPGLGEMGGRPPPPYMLSVAPQTFCFISHSSPSSHRVSFSAFPCSVLPPPSQKFLHRTSF

SEQ ID NO: 12716 - protein, 100 aa, Homo sapiens
GGKSLARRVPKGRMDGLLNPRESSKFIAENSRDVFIDSGGARRVAELLLAKAAGPELRVEGWKALHELNPRAADEAAVNWVFVTDTLNFSFWSEQDEHKW

SEQ ID NO: 12717 - protein, 437 aa, Homo sapiens
  DOMAIN (11)..(23): AT-HOOK-LIKE DOMAIN SIGNATURE domain identified by eMATRIX, accession number PR00929B, p-value=1.804e-09, raw score of 4.38
  misc_feature (1)...(437): Xaa = X or * as defined in Table 2
ALSLLALPPASPPAGRGRPAGPGPAPLPWHQGLPLTRPGPEGPLPQGRLPSPPLQPTPAQPLLLPAFPLLPPAPGPRRVGFAFWCPXSPGLSPPGLPSPDFQTLPCGISFLPEMRKLESWSPAGEPSPPPAPPATRVSSRMQLPDPLTLLPPAGPKATFNSYGVPPPAPEPSQGRVRGHPEPTGPLLHSSQGQEAAPLPPGPCCYGDTAFPRTEGPPSLPPTTRARLSSPPPRFPADVVCVLSVSLVLCTPSLLVVPMXPHPCCTGSLSSWLPPLLMMLLPLPPSPSPSTALPGLGEMGGRPPPPYMLSVAPQTFCFISHSSPSSHRVSFSAYPCSVLPPPXAPAWAQDPILPARVSPPGRVPFPPCPPPSHPTPGSEAPHSXPSVFLRKWLKATGPPAQPSAPPKPGNLGPHKPLWKLFSCASHSFPRSFCTELPF

SEQ ID NO: 12718 - protein, 84 aa, Homo sapiens
  misc_feature (1)...(84): Xaa = X or * as defined in Table 2
FLFWVFQIPAPFPEYVTDLCICTPTSASPNGYLLAGRDKAQRLWERLRVVFQRALRDGAXAGEAGGSTPNTVTMEMQCPPGNAS

SEQ ID NO: 12719 - protein, 108 aa, Homo sapiens
  misc_feature (1)...(108): Xaa = X or * as defined in Table 2
AGVQWRNLCSLQAPPPGPRSFSRLSLPSSQVAGTYRRPPPSPANFLYVXXRRGFTTVNQDGLDLLTSGSPASASQSAGISGVSHRAQPSFTFFRLACHVFVRHCHLPT

SEQ ID NO: 12720 - protein, 251 aa, Homo sapiens
  misc_feature (1)...(251): Xaa = X or * as defined in Table 2
LIQFLLLHSIGLYSYTTICLFILLLMEYWLFPVFSYYYYYFFFLRRSLALSPGWSAVVQSRLTATSASQVQTILLPQPPEXLGLQVCATTPSXFLYFXXRRDFTMLARMVLISXPRDLPTLASQSAGITGVSHRAWSFLFVLFFFXTESHSVAQAGVQWHDLGSLQPAPLRFKXFSCLSLPSSWDYRRPPLRPANFFVFLVETGFCHVGQAGLELLTSSDLPALASQSVGITSVSHHTRPGMSFFITSHKL

SEQ ID NO: 12721 - protein, 122 aa, Homo sapiens
  misc_feature (1)...(122): Xaa = X or * as defined in Table 2
LQPQPPGLNQSSLLSLLSSWDYRHMPPYPANFXYFPETRFCHVAQTGLELLSSSDPPYSASQSAGITGVTHRAXPRFTLCTGLIRGQHGEKGLAQGHNVRASSSIQGSVVTWGLRGLFFPHH

SEQ ID NO: 12722 - protein, 23 aa, Homo sapiens
LLQPRTCLFFEGVDLNGWASLFL

SEQ ID NO: 12723 - protein, 468 aa, Homo sapiens
  DOMAIN (323)..(378): Actins proteins domain identified by eMATRIX, accession number BL00406D, p-value=7.513e-14, raw score of 12.58
  DOMAIN (279)..(436): Actin domain identified by PFam, accession name actin, E- value=7.1e-19, PFam score of 63.2
  misc_feature (1)...(468): Xaa = X or * as defined in Table 2
MQIFDYNSEITDPGIQQEAAGLEGTRKPWNISMLLTTRNISLCQWFSKCGPEPDTSTSWGTPQKEHCHLVNKVGVDSLRMRGYMHGIIQPLNLFQESQLMPQTLFPFHNFQNCFFEELHKWRCPDYYENNVRKMQLPFSSKLLGSTLTSEEKQERRQQQLRRLQELNARRREEKLQLDQERLDRLLYVQELLEDGQMDQFHKALIELNMDSPEELQSYIQKLSIAVGAGXAENPPSGSQPREWDVVTTASQRPLTWEQLEPSLEDVESMNDFDPLFSEEDTLEWRSRSPRVQPVFNLAAYHQLFVGTERIRAPEIIFQPSLIGEEQAGIAETLQYILDRYPKDIQEMLVQNVFLTGGNTMYPGMKSRMEKELVGXDPSRLSFKVNLASNPCAGMDWYGGLVNWALNHLDDNEVWITRKEYEEKGGEYLKEHCASNIYVPIRLPMSCLPLLRCPRHPSQGSAAGGGGAG

SEQ ID NO: 12724 - protein, 43 aa, Homo sapiens
SSCLSLSKCWDYRHNPQLNKKVFKNFQSSYLIQLGFYPALQPE

SEQ ID NO: 12725 - protein, 74 aa, Homo sapiens
MKTNGYQGRVQWLTDLVLNLKSRPVQSSRPSLGNMVKPPSIQKLGKAWVACTCCPSYSGAGAGGWHEPRSLRLQ

SEQ ID NO: 12726 - protein, 193 aa, Homo sapiens
  misc_feature (1)...(193): Xaa = X or * as defined in Table 2
DRKGLESSPEPPSDCRRPPGMDLLAISPVLLAPSPQPVPQSWPSGXCGRQAPCVLESGHSAGAGVSSWDGPPVPCKCPPHPGLSQAHPGKTFGPKNLHMVPSGGAQAPGPHKANQQSWPSCPPVPRSRPPTFSHIAENPMERKSFAQGSGAGNWQRKVSNPHPWELQVFESPSRPCVKNGRAAGLVTGGFREG

SEQ ID NO: 12727 - protein, 81 aa, Homo sapiens
FLFYLFIFFETGSHSVTRLECGDTIMARCSLNFPGSSDPPASASWVAGTAGVLYHTWLSFAFFRRDGVSRVARAGLQLLAW

SEQ ID NO: 12728 - protein, 103 aa, Homo sapiens
  misc_feature (1)...(103): Xaa = X or * as defined in Table 2
FFLNRQGLALLLKLEYSGMIIDHCKPQISGAQVILPVSASWVARPTGVYHHAXLIFFKWGREVETESCYVAQAGLELLASSDPPTSTSQRAWITGLSHCAWPA

SEQ ID NO: 12729 - protein, 60 aa, Homo sapiens
  misc_feature (1)...(60): Xaa = X or * as defined in Table 2
IFHVLKNCQTRSIYLALMSFKNEGEIKMFSNIQKLKEFITDRSKLQEMLKNALXAERIYY

SEQ ID NO: 12730 - protein, 74 aa, Homo sapiens
  misc_feature (1)...(74): Xaa = X or * as defined in Table 2
FETGSHSIFWAGVQWYNHSSLQPRLPGLRXFSHLSLPSSWDHRCTPPRPCNFSIFSRDGFSSCXSGWSQTLGLK

SEQ ID NO: 12731 - protein, 633 aa, Homo sapiens
  DOMAIN (217)..(230): DELTA OPIOID RECEPTOR SIGNATURE domain identified by eMATRIX, accession number PR00525E, p-value=7.171e-09, raw score of 11.91
  misc_feature (1)...(633): Xaa = X or * as defined in Table 2
MVSQGCRSREMRDAHAGWDSPTALHMARGLGRRVFSAPRHTEGGTPDGNSHLSPNQKMEKLTEKGCKQLRQGGLCVRVSDRTVRSVQETTAITATLKGSLGTYCRGTRNLLTAEGFMPHASVCIQSKSGKVARNTVQGFTAHGKAVLEAAVSASGPAGTWGCLRIKWPRSVSWLLKPERAATLVGHGCRKSGCPPGLGGSAKMPPRHQSAAPAGRGRCPCWGPEPTSGSLSNQQWLPGALHAPPLPSAPLLGPPLLSRTVDTGPGGSGREVEATTCGRRLKDKDSEHAGAGSRHHQSQVTGSLGEERAVRAESPGEGPAEFLRRIQGAVQTRAVTAGSSVEKINTKLETCDCDASEEEVLGGDNVETEERSVCVPEPVKMTLFEKRVFADIIRCLARWAPAATNRRDLVNTLIPGHGPSCSLVAFLAPPSPRPYPXPAARCWWASDFPERGKRLRPAHSSFPVPAPPCVPVQSQSGPLPCTPRHFPLPFPAPAFGICRGPRAAPGGSKAVATQRPWWLYAPGTAPGGLPWXAVPGHNKSIPPQPVSNLTETPLNAPQSSWAALGSKRLGQGCSHGFFAFSFTADVCTNDDTLSNANSLTEVLATEIKHDINLANEGLAWDRGWDYQGKDMLSL

SEQ ID NO: 12732 - protein, 158 aa, Homo sapiens
  misc_feature (1)...(158): Xaa = X or * as defined in Table 2
FWKSPYSVQPRTEARAQGNKQKEFRETAPGSSSKADTKSEHLWALLPSRRWGGSQTQHPPLAREPQFLACGPMKDIRLADWSTPLLSNPSXKLPXICQSCPLEQEGKQKAXDARGVPSFPELQPPSGLTAQGQTHRPHPDLRMTCGRTWHFFLAKTLH

SEQ ID NO: 12733 - protein, 155 aa, Homo sapiens
  misc_feature (1)...(155): Xaa = X or * as defined in Table 2
SRGILADPPRPGGQPDFLQPXPTRVAALSGLSNQDTDLGHLMRRQPQVPAGPEAETAASRTALPCAVNPWTVLRATLPDLDCIQTEACGMKPSAVSKFLVPRQYVPRLPFKVAVMAVVSCTLRTVLSLTLTHSPPCRSCLQPFSVSFSIFWFGDK

SEQ ID NO: 12734 - protein, 532 aa, Homo sapiens
  misc_feature (1)...(532): Xaa = X or * as defined in Table 2
XWWEPSPFQPQRDSLKVTGLQRAAFNPVAPTHSFKDQHPMPSFCHFLSGPVPSSRTTLATGRAAPHSSPLKSLVQGYAPWQTSMSCDYQPPRRQEHKETSRRNSEKQLQAPAQRPTPKANTSGRSCLQEDLLPEAQPGLSVPVCHPCPLLHAARLAVSAAAAIRGLEVAEAALVCAQKLLAACSSHSLITVWSRGKVKETGLPSTVQAVSELLQVLLCKQKAGGCTPDQGPHTSKVLTEASSLPRISRMCLLQPGPFSDNIPLGTATLTPAATAATPGPLLPCTKHGNPLGHGLTCHYPLAPLPLPPAPHVRFAALSCLERSAGCCLCTPSCRITTVGGSVGSCASELNHRACFSLPLMLGFQAPIATHQWLFSVRNDKNTLDTPRSAGCDGAHRPRQEPAPDGPIVLLCLEPMPAPGSYPGGAPVSGHRQVHPQQWQVQHLGQSGGIRTGLGANCGKSHDSAYKKGGDVCFPGEMVPVVHQILKGVQHPNKCRGHWGTLVQQKQPWTGSRGPTADQLHPKNSSLTLVFPSR

SEQ ID NO: 12735 - protein, 488 aa, Homo sapiens
  misc_feature (1)...(488): Xaa = X or * as defined in Table 2
GLPQAGADSDPRTRPFLLLGGLPGLPSPRPYPXPAARCWWASDFPERGKRLRPAHSSFPVPAPPMRPRTVPVRAAPPHPPSFPTSVPSTGIRHLPRAEGWXTGQXRNTPNKSRRRLSPLVTPGSCRSSPTQSPGPSGTTVEMPARRWCAGATGPGATSPSSLKVKETGLPSTVQAVSELLQVLLCKQKAGGCTPDQGPHTSKVLTEASSSAPHLQNVLAAARSISDNIPLGTATLTPAATAATPEASPPLHQAWQPSTAMASPAITPWPHYPCPQLRMSGLLPCPAXNAPQAAVSVPPPAEXRLLAALWVHVLRNXTTGPASHCHXCSASKPPSPPTNGYSVSAMTRTPWILPDRLAVMVLTGPGKSQPQMRPIVLLCLEPMPAPGSYPGGAPVSAAXAGTPPAVAGAASRAVGGHPHRPGCKLRQIPXFCIQEGWGRVFSRGNGPCRASDSQRGPAPKQVQGSLGDTGATEAALDWESGPHCRPAPP

SEQ ID NO: 12736 - protein, 498 aa, Homo sapiens
  misc_feature (1)...(498): Xaa = X or * as defined in Table 2
IPSACFLVLLPSWWLVVAAHGSLPGRVALDQAFQWTRVRGCSACGKGCPAAGPQAQRGSGRSWAWDAGPXRSVWGPLGXTQPAAALXPXVSPFVAGKGLAPTTLVGTAIQSILQGLILSWNPGGEPAGXRNDLGAGGRACCPDEDDQIRGGAVLAEVTXQCSCSPMPDAAHHRHRVRVGVSGAAVCPQWELGGHGGNARPDAGRGVLRSCRGTRNLLTAEGFMPHASVCIQSKSGTSGTQHCPGVHCTWQSCPLPSAPLLGPPLLSRTVDTGEEGHPVDASWTPSTPREPGRWAHCLPQRKPPLGPREARASVPPAHSGTVAGEAPPVISHFRSPAPAFGICRGPRAGATEALPAPRADAPVKAAVPAHTGAASEPARHVRPFPTATAPFTFPSAVHKGSGFSTSLQTLVIFCCVLMVAIPMGVRWHLTVVLWTNLAVISRVPISVCALDLSFISVPCPLRCWCWWNRVSPKLASPGCSECDLCGQMRVMVSSHFSVE

SEQ ID NO: 12737 - protein, 116 aa, Homo sapiens
  misc_feature (1)...(116): Xaa = X or * as defined in Table 2
LPSSWDYRRPLIFVFLVETGFNMLARMVSISXPLDPPDLASRSDEIIGVSHRAWLILSXXKGERKSTNVSHKEGLGXWSRATVLQVYSVGFWEVPFQGCPQSQSYFHNNTNMLFAF

SEQ ID NO: 12738 - protein, 61 aa, Homo sapiens
  DOMAIN (10)..(61): Ribosomal protein L30 proteins domain identified by eMATRIX, accession number BL00634, p-value=4.770e-11, raw score of 34.38
  DOMAIN (13)..(57): Ribosomal protein L30p/L7e domain identified by PFam, accession name Ribosomal_L30, E-value=2e-06, PFam score of 26.1
VEEGGSEAGWALRIKCINGVSPKLVLQLLHFPQIFNGSFVKLNKASVNTLRIVEPYITWST

SEQ ID NO: 12739 - protein, 419 aa, Homo sapiens
  DOMAIN (326)..(350): Glycosyl transferases group 1 domain identified by eMATRIX, accession number PF00534B, p-value=3.455e-15, raw score of 14.47
  DOMAIN (267)..(398): Glycosyl transferases group 1 domain identified by PFam, accession name Glycos_transf_1, E-value=9.4e-31, PFam score of 114.9
  misc_feature (1)...(419): Xaa = X or * as defined in Table 2
MAEEQGRERDSVPKPSVLFLHPDLGVGGAERLVLDAALALQARGCSVKIWTAHYDPGHCFAESRELPVRCAGDWLPRGLGWGGRGAAVCAYVRMVFLALYVLFLADEEFDVVVCDQVSACIPVFRLARRRKKILFYCHFADLLLTKRDSFLKRLYRAPIDWIEEYTTGMADCILVNSQFTAAVFKETFKSLSHIDPDVLYPSLNVTSFDSSCSXKAGMTXSPRGKNSWLLSINRYEREGKIWTLGTGKALVQLRGRLTSQDWERVHLIVAGGYDERVLENVEHYQELKKMVQQSDLGQYVTFLRSFSDKQKISLLHSCTCVLYTPSNEHFGIVPLEAMYMQCPVIAGNSGGPLESIDHSVTGFLCEPDPVHFSEAIEKFIREPSLKATMGLAGRARVKEKFSPEAFTEQLYRYVTKLLV

SEQ ID NO: 12740 - protein, 168 aa, Homo sapiens
  DOMAIN (20)..(143): Glycosyl transferases group 1 domain identified by PFam, accession name Glycos_transf_1, E-value=8.6e-12, PFam score of 46.9
  misc_feature (1)...(168): Xaa = X or * as defined in Table 2
LSQTLTVLYPSLNVTSFDSVVPEKLDDLVPKGKKFLLLSINRYERKKNLTLALEALVQLRGRLTSQDWERVHLIVAGGYDERVLENVEHYQELKKMVQQSDLGQYVTFLRSFSDKQKISLLRQLARVCFYTPRQXGTLGIVPLGRPCYMAVPQFICCLIRVGPFGSSI

SEQ ID NO: 12741 - protein, 87 aa, Homo sapiens
  misc_feature (1)...(87): Xaa = X or * as defined in Table 2
ERGSRSIARLECSGAISAHCNFRPPGSSDSSPSACRVAGITGTRHHPQLFFVFLVEMGFHHVAXDGLKLLNFMIHLPQPPKVLGLQV

SEQ ID NO: 12742 - protein, 112 aa, Homo sapiens
  misc_feature (1)...(112): Xaa = X or * as defined in Table 2
PIIITYFEFLNGYIISQKIKFSHHQLQKIDFLPXTWHLFLIEQRXNILMEGNQFSVTDDVKILFSGKLYSHSKIQSMLLXLVTREXCYMFNCNICLLSFSSLSVIINDLQNP

SEQ ID NO: 12743 - protein, 89 aa, Homo sapiens
  misc_feature (1)...(89): Xaa = X or * as defined in Table 2
FFEAGSHSGCPGWSESGAIIAHCSLDLPGSSNPTSASXIAGTRSMHHHAHLIFVFLVETGSPYVVQPSLKLRVQAILPPRPPKVLGLQA

SEQ ID NO: 12744 - protein, 253 aa, Homo sapiens
  DOMAIN (26)..(120): Kelch motif domain identified by PFam, accession name Kelch, E-value=1.1e-12, PFam score of 55.5
  misc_feature (1)...(253): Xaa = X or * as defined in Table 2
YSVRGLVPAERRTPYPGSIVAPADGMVYALEGMGPDTAPQAQVRVYEPRRDCWLSLPSMPTPCYGASTFLHGNKIYVLGGRQGKLPVTAFEAFDLEARTWTRHPSLPSRRAFAGCAMAEGSVFSLGGLQQPGAPQLYSRPHFVNTVEMFDLEHGSWTIIAPQPAHEGXEGQTLWLGPLGATLWPLGALETSHVLWALLESFSLARRRWEALPAMPTARCSCSSLQAGPRLFVIGGVAQGPSQAVEALCLRDGV

SEQ ID NO: 12745 - protein, 312 aa, Homo sapiens; identical to SEQ ID NO: 9627

SEQ ID NO: 12746 - protein, 341 aa, Homo sapiens; identical to SEQ ID NO: 9628

SEQ ID NO: 12747 - protein, 113 aa, Homo sapiens
  misc_feature (1)...(113): Xaa = X or * as defined in Table 2
LNLLMYFRDNVSFCHPGWSTVMXSXLAAASNSWVTXSSCFSLPSSWDXSXLPPCPANFFFFCQXRQNLIMSSRLVSNSLQPQVMLLPQPLKALGLYRVSHHASVKVFNVLINM

SEQ ID NO: 12748 - protein, 142 aa, Homo sapiens
  misc_feature (1)...(142): Xaa = X or * as defined in Table 2
GDGVLLCRPGXSTVALSQFTAISASWVKRSSCLNLPSSWDYRCAPPCPAKFCIFSRDGGFTMLARLVSNSXPQMIHPPWPPKVPPLPACVWYFSMACNFLYTPSFFLRLFCQQPKMEKAALCQGSPKTVKSCESQMFTFNFF

SEQ ID NO: 12749 - protein, 131 aa, Homo sapiens
GGIRRKLLTFLLVAGCWTPEASPIIMATSATSPHAPGFPAEGRCGYYVEKKKRFCRMVVAAGKRFCGEHAGAMEVWYRPTLSRVGNKYPGPVGAGTRPLPSLTAFCLCPLDSPAFTLINPVLPSLRSDYEF

SEQ ID NO: 12750 - protein, 128 aa, Homo sapiens; identical to SEQ ID NO: 9789
  misc_feature (1)...(128): Xaa = X or * as defined in Table 2

SEQ ID NO: 12751 - protein, 16 aa, Homo sapiens
GVSPCWPGWSQTPDLK

SEQ ID NO: 12752 - protein, 138 aa, Homo sapiens
  misc_feature (1)...(138): Xaa = X or * as defined in Table 2
DMRPQLCSVDNHREQRAEFINIYQHQFFFLRQSLTSVAQAGVQWCSLSSLQPLPTGFKPFSCLSLLSSWDYRHMPPSLANFFCIFSRDRGFTMLARLVLSSXPQCDPPALASQNAGITGMSHHAWPTPTFSYLLNTQD

SEQ ID NO: 12753 - protein, 71 aa, Homo sapiens
  misc_feature (1)...(71): Xaa = X or * as defined in Table 2
FFFFFLMLHNNVYLVLHLFTISYKHFIIIVLYKQQFKFTYVYTFICLLVFQFQIILLESFPFLKIILLXSL

SEQ ID NO: 12754 - protein, 93 aa, Homo sapiens
  misc_feature (1)...(93): Xaa = X or * as defined in Table 2
FFFAPETESYSVARLECSGTILVHCTLCLPGSSDSPASASQVAGTTGACHHTWLILVILVEIGFHHVGQAGLGISXLQVIRPPWAPKVLGIIG

SEQ ID NO: 12755 - protein, 123 aa, Homo sapiens
  misc_feature (1)...(123): Xaa = X or * as defined in Table 2
FFLRWCFALVAQAGVQWQDLGSLQPLPPGFKRFSCLSLPSSXDYRCPPTRLANFSVFLVEMGFHHVSQAGLELLTSGDLTTLASQSAGTTGVSSRAWPDLYLFSYLIEKTSPFKFSIPFHLEI

SEQ ID NO: 12756 - protein, 353 aa, Homo sapiens
  DOMAIN (292)..(319): Protamine P1 proteins domain identified by eMATRIX, accession number BL00048, p-value=6.963e-09, raw score of 6.39
  misc_feature (1)...(353): Xaa = X or * as defined in Table 2
KKGCGKPGELCGCMPSSWKNAYCPTAQQTAQEYLSSPCGSAAPCLPDRASSSSRSVEASSLDSAPGTSAAGSPSPRPFGGEYHHPGPGANNEPTPPAESIVVPSWPXGCHSSVAVEKLSLAPGTPTSDLPLLDSSMNRKAPIPVFGLSASSLLPLKDARASETSSRXTHQXFFGKDVHXTQNSLAQSLQHSSGPQLLWGKTGNSQSSFPQAGXHSRHKEGCWREPSHKPLEPHSLSQHHGTASSARIPEVPPPHSLGHSPACAWRSSSPRPPRPLAALPGCRRRRGAGSSHKAPDRSTARPGRCGRRRGRRGARRGCGGGSRGPSHSGPQRSESAPPAGAHTRLQPLRSHSLH

SEQ ID NO: 12757 - protein, 718 aa, Homo sapiens
  DOMAIN (492)..(502): w KINASE ALPHA ADHESION T-CELL domain identified by eMATRIX, accession number DM00179, p-value=5.263e-10, raw score of 13.97
  DOMAIN (73)..(387): Leucine Rich Repeat domain identified by PFam, accession name LRR, E-value=7.2e-33, PFam score of 122.6
  misc_feature (1)...(718): Xaa = X or * as defined in Table 2
MARMSFVIAACQLVLGLLMTSLTESSIQNSECPQLCVCEIRPWFTPQSTYREATTVDCNDLRLTRIPSNLSSDTQVLLLQSNNIAKTVDELQQLFNLTELDFSQNNFTNIKEVGLANLTQLTTLHLEENQITEMTDYCLQDLSNLQELYINHNQISTISAHAFAGLKNLLRLHLNSNKLKVIDSRWFDSTPNLEILMIGENPVIGILDMNFKPLANLRSLVLAGMYLTDIPGNALVGLDSLESLSFYDNKLVKVPQLALQKVPNLKFLDLNKNPIHKIQEGDFKNMLRLKELGINNMGELVSVDRYALDNLPELTKLEATNNPKLSYIHRLAFRSVPALESLMLNNNALNAIYQKTVESLPNLREISIHSNPLRCDCVIHWINSNKTNIRFMEPLSMFCAMPPEYKGHQVKEVLIQDSSEQCLPMISHDSFPNRLNVDIGTTVFLDCRAMAEPEPEIYWVTPIGNKITVETLSDKYKLSSEGTLEISNIQIEDSGRYTCVAQNVQGADTRVATIKVNGTLLDGTQVLKIYVKQTESHSILVSWKVNSNVMTSNLKWSSATMKIDNPHITYTARVPVDVHEYNLTHLQPSTDYEVCLTVSNIHQQTQKSCVNVTTKNAAFAVDISDQETSTALAAVMGSMFAVISPASIAVSFPKRFRRKNYHHFIKKVLWQKTSSIPLNELYPPLIXPLGKVDSEKDKDGSADTKPTQVDTSRSYYMW

SEQ ID NO: 12758 - protein, 257 aa, Homo sapiens
  DOMAIN (43)..(57): C2H2-TYPE ZINC FINGER SIGNATURE domain identified by eMATRIX, accession number PR00048A, p-value=1.391e-10, raw score of 10.52
  misc_feature (1)...(257): Xaa = X or * as defined in Table 2
SLLKPYYVRIFTKEKSYKCKECGKFHKSCSRHXNHKIIHTGEKHYKCEECGKVFNHCXQLIAQKKIHAEKNSDFKECGKAFNNYYELTHQRFCARXKQCKCNDTHYIYLWKDVTKXKPXSTQGVMIVIHYICTWKDFKNISLRVHKSFYTEEKHYKYKDCCNTFTYVTDFVVHRRIYTERXPSNSCSNFIPFXIIYIGKKPYNCNEYEKNCLKSTPXKTLVXGRARWLTLIIPAPWEAKAGGSRGQEIETTMKPCLY

SEQ ID NO: 12759 - protein, 681 aa, Homo sapiens
  DOMAIN (89)..(144): Ferritin iron-binding regions proteins domain identified by eMATRIX, accession number BL00540B, p-value=9.368e-29, raw score of 18.82
  DOMAIN (25)..(132): Ferritins domain identified by PFam, accession name ferritin, E-value=2.2e-40, PFam score of 138.9
MVSISRPHDPPASASQSAGITGVSHRLRFYFDHQDVAPECGAYFFHELAKEKRKGVERLLKMQNQRGGPAVFQDILKPGQDEWGKTLEAMEAAMAPGKNLNQSLLDLHALGSAPTDPHLCDFLESHFRDEEVTFMPRKSADLHAAGEAASLGGVSLNVMKGASLHALCLRLLNSFGPGVATLCGERVVHKNNRASALRKCIFWPVSLNSSRARPRQRTTAGGAVPTAALQRVIPASSQCLFPAPMGTTEATLRMENVDVKEEWQDEDLPRPLPEETGVELLGSPVEDTSSPPNTLNFNGAHRKRKTLVAPEINISLDQSEGSLLSDDFLDTPDDLDINVDDIETPDETDSLEFLGNGNELEWEDDTPVATAKNMPGDSADLFGDGTTEDGSAANGRLWRTVIIGEQEHRIDLHMIRPYMKVVTHGGYYGEGLNAIIVFAACFLPDSSLPDYHYIMENLFLPPGQQTTPGPVGLTQPAAGVEAGRVGTAGVLTLDPSMLGPCLLCPVSRYVISSLELLVAEDYMIVYLNGATPRRRMPGIGWLKKCYQMIDRRLRKNLKSLIIVHPSWFIRTVLAISRPFISVKFINKIQYVHSLEDLEQLIPMEHVQIPDCVLHDRQIILTTLCAYGEGEALASHLFHVILPFHIHSCFPSSTETSDPPCGPGLDLAYTTPFSTHFAQRGK

SEQ ID NO: 12760 - protein, 220 aa, Homo sapiens
  DOMAIN (69)..(84): WILM'S TUMOUR PROTEIN SIGNATURE domain identified by eMATRIX, accession number PR00049D, p-value=2.525e-09, raw score of 0.00
  misc_feature (1)...(220): Xaa = X or * as defined in Table 2
GHSANWWLGPEENPALPTPELVSPPRGCRQSSRPSLRRHKEEKAKXKSPQPTILRPPPAPPTGSLQAPKGGARPPSRPRPPPPRPAAPNPRPLPPPPSPEPGRSSCPAPPTTRTTPRQSQTHRPPPSSAYEKKDAARAPTATGRAPRRPGLRPKSWMPEQEKEPPTDRSIDRTPVPSPYQTREGGRAPRASSIXGPDSPATRQDGSSGPHRSYRPGCVAR

SEQ ID NO: 12761 - protein, 320 aa, Homo sapiens
IMATSATSPHAPGFPAEGRCGYYVEKKKRFCRMVVAAGKRFCGEHAGAMEEEDARKRILCPLDPKHTVYEDQLAKHLKKCNSREKPKPDFYIQDINAGLRGETEIPEQLCLNSTLTDHIMSHPALHDALSDPINGDSATKHLKQQASILGNIENLKLLGPRRCFVEFGAGKGKLSHWVDIALKDAEKVHFILVEKVTTRFKVDGKHRKKNSVFERLQIDIQHLCLNKIPVLREEKLPVVGIGKHLCGMATDLALRCLVETYAASFEERNEEPLAKRIKNDKTEKEIYTLAKEGNEKNVPEKWNPVAGIVIALLCHHRCDW

SEQ ID NO: 12762 - protein, 128 aa, Homo sapiens
  misc_feature (1)...(128): Xaa = X or * as defined in Table 2
FCIFSGDGVSPCWPGWSRIPDLRXSACLSLPSSWDYRRPPPRSANFFXFLVKTGFHHVGQAGLELLTSGDPPASASLSAGITGVSHCTRPMYAFLKQLNFHIIDKSDYRLYRKLYLKATTMVFRYAFL

SEQ ID NO: 12763 - protein, 164 aa, Homo sapiens
  misc_feature (1)...(164): Xaa = X or * as defined in Table 2
ETESHSVTQAGVQWCDLGSLQPPPPRLKRFSCLSLPSGWDYRHVPPHLANVCIFXXIWCFTMFARLVFNSRRTPSDLITSASXSAGITGVSHRARLCIFYFYFFVAEMVRMSCFVTQVGLEFVALSDLPPWPPKVLGLQAXANSAWPVFYCNSFFHSHLNAFPN

SEQ ID NO: 12764 - protein, 100 aa, Homo sapiens
  misc_feature (1)...(100): Xaa = X or * as defined in Table 2
LSCFPQATFFFFIFXDRVLLCPGRSTVVQSQLTAALTSRAQGSSCLSLPTKWDYRHVPPYSAFFLFVLDKSLALLPRLVLNSWAQAILPPQPPKVLRLLA

SEQ ID NO: 12765 - protein, 134 aa, Homo sapiens
  misc_feature (1)...(134): Xaa = X or * as defined in Table 2
QFFFFEIGSLSVAQVGAQWRSTSPLQPWSPGFKXFSHLSLPESWEHRPMPQGLDNFCIFVETGFRHVAQASIKLLGSSDLPALASQSAGMTSMSHHAWPIVKNFVCIYYVPDIVLSMLSVKSINIHINHVRGLQ

SEQ ID NO: 12766 - protein, 65 aa, Homo sapiens
  DOMAIN (41)..(65): Ribosomal protein S8 domain identified by PFam, accession name Ribosomal_S8, E-value=3.6e-05, PFam score of 20.3
  misc_feature (1)...(65): Xaa = X or * as defined in Table 2
LTGRLSKCEVVSWRFDVQLKDLKRWQNHLLLSQQLACIVLTSAGIMDHKEMRXKHTGGKSLGFFF

SEQ ID NO: 12767 - protein, 297 aa, Homo sapiens; identical to SEQ ID NO: 12403

SEQ ID NO: 12768 - protein, 268 aa, Homo sapiens; identical to SEQ ID NO: 12404

SEQ ID NO: 12769 - protein, 117 aa, Homo sapiens
  misc_feature (1)...(117): Xaa = X or * as defined in Table 2
ETEFPSCCQAGVQXHDLGSRQPPLPGSSDSPASASRVAGITGMHHXSRDVLIRILELEEGLELCPHFSVRNLPKTGQILTLMLSLAPVKLAPQPKLSWMELTRHSRLWAALSGGGQV

SEQ ID NO: 12770 - protein, 134 aa, Homo sapiens
  misc_feature (1)...(134): Xaa = X or * as defined in Table 2
YIFSRDRVLPCFPGWSQTPGLKQSARLCLPKCWDYRREPPQLAEDSYFQFRASLKMTLXGIVSMVPLLQKLLWMCKAQGNQAEEGTGVALPEREASSWSCLLQLPFPVDEPCSSFKRRESEKEPSPNGFPNLNI

SEQ ID NO: 12771 - protein, 224 aa, Homo sapiens
  misc_feature (1)...(224): Xaa = X or * as defined in Table 2
VGSVEEFQGQERSVILISTVRSSQSFVQLDLDFNLGFLKNPKRFNVAVTRAKALLIIVGNPLLLGHDPDWKVXAPPPHSPSXWPQPLPRAGGSFLSACLSLSXSSDVSIFTASLLYLXVKXHPEVEQVQLRWDRTVAXPPVSAGHSSVPHRFLEFCKENGGYTGCPFPAKLDLQQGQNLLQGLWSKLSPSTSGPHSHGLTSPREREGERGPVFCKWEPEWRNEL

SEQ ID NO: 12772 - protein, 79 aa, Homo sapiens
SLDSDSGCKAYVGDEYLPGPLDLHAQPSLLKEHEEEKMFTLKGNRLPAADVKNIIFFVRPRLELMDIIAENVLSEDRRG

SEQ ID NO: 12773 - protein, 112 aa, Homo sapiens
GFPIIFHGVMGKDEREGNSPSFFNPEEAATVTSYLKLLLAPSSKKGKARLIPRSVGVISPYRKQGASEDLEDIKDFEGGFSKKNSKAQERSVILISTVAKRPRALLQLDLDF

SEQ ID NO: 12774 - protein, 80 aa, Homo sapiens
  misc_feature (1)...(80): Xaa = X or * as defined in Table 2
SELGTVAHTCNLILPSSGDYRRPSPHLANFXFLVEMGFHHVGQSGVELLSSGDSLALASQSPGITGVSHRAQVPPPFFFF

SEQ ID NO: 12775 - protein, 597 aa, Homo sapiens
  DOMAIN (221)..(256): Eukaryotic cobalamin-binding proteins domain identified by eMATRIX, accession number BL00468D, p-value=3.571e-23, raw score of 17.04
  DOMAIN (3)..(390): Eukaryotic cobalamin-binding protein domain identified by PFam, accession name Cobalamin_bind, E-value=2.4e-120, PFam score of 413.2
  misc_feature (1)...(597): Xaa = X or * as defined in Table 2
MRQSHQLPLVGLLLFSFIPSQLCEICEVSEENYIRLKPLLNTMIQSNYNRGTSAVNVVLSLKLVGIQIQTLMQKMIQQIKYNVKSRLSDVSSGELALIILALGVCRNAEENLIYDYHLIDKLENKFQAEIENMEAHNGTPLTNYYQLSLDVLALCLFNGNYSTAEVVNHFTPENKNYYFGSQFSVDTGAMAVLALTCVKKSLINGQIKADEGSLKNISIYTKSLVEKILSEKKENGLIGNTFSTGEAMQPSGVLPLNGCSTTTLAVACSTGHRKCASRALENRCRSPAAKVTKNKRLSNCQTGQRKLRRCDNRMQCGVLDRILEQKEDISGTTSEIQIKWGVELHSVSRWRLGKVAMEMVQCQKAGYPERGDGVGAVAEGPNIKVAGGLRELETRKTALPENESSQEHAFITITLQHLVQGLAHSGYSVLSKCLLNENRAMQKHGTVWTQQIQSSAAEKSEKTMSWDRLGRGTAHSWQACPVSLKKQAVEGAHQEEQCKRRDEMRPGESDLVTMASGRDALLCGRCCQQAKTEELTITVPRLGEQREAPLPCSTPPGSTPPAAKPRPSAAPDGPSSXSPGARRQVARPRRGQAPENK

SEQ ID NO: 12776 - protein, 118 aa, Homo sapiens
  misc_feature (1)...(118): Xaa = X or * as defined in Table 2
LGGASEATGASAAQPPPPPPAPRAPNPAPGPAPAQRXSALDPPLPGRAPRSFLKGPRPATARPPGWRLQSPLPXPESPPDTRGVRGEAPAPADPAAGPRKSKSDCLAAVIRCLCRAPR

SEQ ID NO: 12777 - protein, 23 aa, Homo sapiens
MNSFLVFFPLYVQMYMLRLNFCA

SEQ ID NO: 12778 - protein, 182 aa, Homo sapiens
  misc_feature (1)...(182): Xaa = X or * as defined in Table 2
EGGVCLSWCGWFGPVCCDYTPPLPEPRDGCLCPLPKMPPAPPMLPIQQSFQPFQERPGPSPVPETASPPAGNXISHLSEGPPNTQWSPGFKPWGVCHLXCGHVGVPPLKPAPCPLECCPSGCVDSGAFPQKHSPSGSGPETAAGPSHLNDNWQRLGFYELLSGIFCRAPNKCICYVSIFVLK

SEQ ID NO: 12779 - protein, 120 aa, Homo sapiens
PRVRDPRVRPRVRRRIYKPLRTRDELDQFLDKMDDPDYWPAVDFFSGDVMIHPVTNRPADKRSFIPSLVEKEKVSRMGHAIKMGWIQPRRPRDPTPSFYDLWAQEDPNAVLGRHKMHVPA

SEQ ID NO: 12780 - protein, 684 aa, Homo sapiens
  DOMAIN (364)..(379): G-PROTEIN BETA WD-40 REPEAT SIGNATURE domain identified by eMATRIX, accession number PR00320A, p-value=1.000e-11, raw score of 16.74
  DOMAIN (340)..(379): WD domain, G-beta repeat domain identified by PFam, accession name WD40, E-value=8.6e-06, PFam score of 32.7
  misc_feature (1)...(684): Xaa = X or * as defined in Table 2
DSGSDSSEDDDEGDEEGEDGALDDEGHSGIKKTTEEQVQASTPCPRTEMASARIGDEYAEDSSDEEDIRNTVGNVPLEWYDDFPHVGYDLDGRRIYKPLRTRDELDQFLDKMDDPDYWRTVQDPMTGRDLRLTDEQVALVRRLQSGQFGDVGFNPYEPAVDFFSGDVMIHPVTNRPADKRSFIPSLVEKEKVSRMVHAIKMGWIQPRRPRDPTPSFYDLWAQEDPNAVLGRHKMHVPAPKLALPGHAESYNPPPEYLLSEEERLAWEQQEPSERKLSFLPRKFPSLRAVPAYGRFIQERFERCLDLYLCPRQRKMRVNVDPEDLIPKLPRPRDLQPFPTCQALVYRGHSDLVRCLSVSPGGQWLVSGSDDGSLRLWEVATARCVRTVPVGGVVKSVAWNPSPAVCLVAAAVEDSVLLLNPALGDRLVAGSTDQLLSAFVPPEEPPLQPARWLEASEEERQVGLRLRICHGKPVTQVTWHGRGDYWPLVLAPRGHTGVLIHQLSRRRSQSPFPCTHVXVHRVAFSPARPFLLVGPQRSVRLYHLLRQELTKKLMPNCKWVCQPGGCNPAGDNVICGSYDSKLVWFDLDLSTKPYRMLRNHHRRALLAVAFHPRYPLFASGSDDGRVIVCHGMVYNDLLQNPLLVPVKVLKGHVLTRDLGVLDVIFHPTQPWVFSSGADGTVRLFT

SEQ ID NO: 12781 - protein, 70 aa, Homo sapiens
  misc_feature (1)...(70): Xaa = X or * as defined in Table 2
QDSALLQLLXIIYPVYNLSPAGQGRLDLFSCLLRHRLKLPTSEGVRTQSALQAFKGPNAQTQWIYGHDPN

SEQ ID NO: 12782 - protein, 75 aa, Homo sapiens
  misc_feature (1)...(75): Xaa = X or * as defined in Table 2
IHCAISKIDIEKDIQAVMEETAILSTENKSEFLLTDYFEEDPNSAMDKERRKSLLKPKLLRLQRDIEKASKDKEX

SEQ ID NO: 12783 - protein, 174 aa, Homo sapiens
CIGKVYVWLGGVGWLQKSWGTPLFSPHPPGRPRSFAKGHSPPQGILGVGLGGENRILVIIFNLIYCTYLGQGLGEVEGGEGSPLSAPPTPFLRRFVCVGPHPLPIPHCCLDVVLFFYRSPFPSSPFSPPPHPLLPLPFVSCSFLGFCTTQLVYTVYTQPAKRKPNGKHFKKKKK

SEQ ID NO: 12784 - protein, 261 aa, Homo sapiens
  DOMAIN (6)..(96): Fes/CIP4 homology domain identified by PFam, accession name FCH, E-value=0.057, PFam score of 5.5
  misc_feature (1)...(261): Xaa = X or * as defined in Table 2
HFNMRDPLTDCPYNKVYKNLKEFSQNGENFCKQVTSVLQQRANLEISYAKGLQKLASKLSKALQNTRKSCVSSAWAWASEGMKSTADLHQKLGKAIELEAIKPTYQVLNVQEKKRKSLDNEVEKTANLVISNWNQQIKAKKKLMVSTQETXSTFPSLXESSARQSMTEKEKRKLLNKLTKSTEKLEKEDENYYQKNMAGYSTRLKWENTLENCYQSILESWRRKEFNFYAITLNQYSQHISLFGQTLTTCHTADSLCHQQD

SEQ ID NO: 12785 - protein, 176 aa, Homo sapiens
  misc_feature (1)...(176): Xaa = X or * as defined in Table 2
MFLAPIAVSVRRFFXVKASVYAYTMFFSTFYHACDQPGEAVLCILSYDTLQYCDFLGSGAAIWVTILCMARLKTVLKYAYRCGHRRQCYPTLWQRWAFYLLPGVFMASVGIAIYTSMMTSDNYYYTHSIWHILLAGSAALLLPPPDQPAEPWACSQKFPCHYQICKNDREELYAVT

SEQ ID NO: 12786 - protein, 598 aa, Homo sapiens
  misc_feature (1)...(598): Xaa = X or * as defined in Table 2
MLCFYAGSCRHFRSGAPPVINPLGTSFPDDTAVQPSFQVGVPLSTTPRSNASVNVSHPAPGDWFVAAHLPPSSQKIELKGLAPTCAYVFQPELLVTRVVEISIMEPDVPLPQTLLSHPSYLKVFVPDYTRELLLELRDCVSNGSLGCPVRLTVGPVTLPSNFQKVLTCTGAPWPCRLLLPSPPWDRWLQVTAESLVGPLGTVAFSAVAALTACRPRSVTVQPLLQSSQNQSFNASSGLLSPSPDHQDLGRSGRVDRSPFCLTNYPVTREDMDVVSVHFQPLDRVSVRVCSDTPSVMRLRLKPGMDSGGSLTISLRANKTEMRNETVVVACVNACLALPLALILSLNCTTAFFQGYPLSLSAGSRRANLIIPYPETDNWYLSLQLMCPENAEDCEQAVGPRWEDHLCTWGALFXTDCGPYGQCSLLRRHSYLYASCSCKAGWRGWSCTDNSTAQTVAQQRAATLLLTLSNLMFLGPPSPSSVRRFFLVEASVYAYTMFFSTGCGVGGQDRAHGASPQFYHACDQPGEAVLCILSYDTLQYCDFLGSGAAIWVTILCMARLKTVLKYVLFLLGTLVIAMSLQLEPQGHVEHLGGPASLPS

SEQ ID NO: 12787 - protein, 56 aa, Homo sapiens
  misc_feature (1)...(56): Xaa = X or * as defined in Table 2
AFCFPKYELTINFKNFQLGVVTHACNPSILGGRGGRITXAQEANLANMAKPCLLNK

SEQ ID NO: 12788 - protein, 39 aa, Homo sapiens; identical to SEQ ID NO: 11671

SEQ ID NO: 12789 - protein, 271 aa, Homo sapiens; identical to SEQ ID NO: 11672

SEQ ID NO: 12790 - protein, 142 aa, Homo sapiens
  misc_feature (1)...(142): Xaa = X or * as defined in Table 2
GIPGRRNMAVADLALIPDVDIDSHGVFKYVLIPSPLGLPAPGIRPAESKEIVRGYKWAGHHADIYDKSVGATCRKQGLRTVSVWTAGPHLPTKSPGQERFTXYGXFHGPMVLPKNANFNLRKSKAKYPRLTEVTLGLNRPAT

SEQ ID NO: 12791 - protein, 116 aa, Homo sapiens
  misc_feature (1)...(116): Xaa = X or * as defined in Table 2
TLRLTHLHTDTHQHSHSYTHTEIHTPHTPHTETQTHXYTYALQPLRSHLIFLRQSRPQNGNAPLCEFSPHSPDVLQTLLHLTSVVVKIPSTSLLMCRSSGGAQCRESLDQHEGVGP

SEQ ID NO: 12792 - protein, 109 aa, Homo sapiens
  misc_feature (1)...(109): Xaa = X or * as defined in Table 2
FFEMESPSVSQAGVXGPNLGSLQPPPPQFKQFFCLSLPSSWDYRRTPPCPANFWIFXKDGVSPSWPXWSQSLDLGLFKFIYFFKETLILCTQSSTTTTTTKRTTRSSHR

SEQ ID NO: 12793 - protein, 110 aa, Homo sapiens
  misc_feature (1)...(110): Xaa = X or * as defined in Table 2
SHSVAQAGVQWHNLGSLQPPPPAFKXFSCLSLPSNXYYRRPPPHPADFXFLVETGFSHVGRAGLKLLTSSEPPACASQSAGITSVSPPCRAHTFELIPLCPFLFWPLFCP

SEQ ID NO: 12794 - protein, 9 aa, Homo sapiens
MQINSQMER

SEQ ID NO: 12795 - protein, 87 aa, Homo sapiens
  misc_feature (1)...(87): Xaa = X or * as defined in Table 2
EMESCSVTRLECSGAILAHCNLCLLGSSDSPASASXVAGITGMCHYTRPTFLFLVEMGFCHVGQAGLELLTQVIRPPRPPKVLGLQA

SEQ ID NO: 12796 - protein, 172 aa, Homo sapiens
  misc_feature (1)...(172): Xaa = X or * as defined in Table 2
FSFFFFPAFKMSNRGRGGSLLGRKFPDFPLGPSGRLLXSNWCLTNTRSPKTLYIHLPXRGNQGDRLDQTSPLLGVGDMVMAHSVKKGKPELRKKVHPSSGSFRQPKVHYPXEKMGVFLLFFEGXLQGVIVEPFKGRDGKVSCHLPGTQLGKGSFADFVAPGICIPMPWQPLH

SEQ ID NO: 12797 - protein, 71 aa, Homo sapiens
  misc_feature (1)...(71): Xaa = X or * as defined in Table 2
DRSHSVTQAGVQWCDLSSLPPPPPGLKXFLCLSFLSSWDYGAPPHQTNFYIFIRDGVSPYCPGWPXTPSLG

SEQ ID NO: 12798 - protein, 136 aa, Homo sapiens
  DOMAIN (71)..(110): kw TRANSCRIPTASE REVERSE II ORF2 domain identified by eMATRIX, accession number DM01354X, p-value=4.979e-09, raw score of 13.86
  misc_feature (1)...(136): Xaa = X or * as defined in Table 2
IIRSKNIXYLEINPTKHTKTFSKTLTKEMKEDLNXWQEIPCSWIGSVSIVKMSVLSKLIHTEIQCNRNKYPQIGLLLLPLLLFFLLDRLVLKFTWKGTGPRMAKAILRKSSEDLTLTYINTYYKATVIKLVGAKPD

SEQ ID NO: 12799 - protein, 771 aa, Homo sapiens
  DOMAIN (515)..(531): CHROMOGRANIN SIGNATURE domain identified by eMATRIX, accession number PR00659B, p-value=9.746e-09, raw score of 13.09
  misc_feature (1)...(771): Xaa = X or * as defined in Table 2
NKHFSFQTPKKSHQKSLSFSKTTPRRISHTPQTPLYTPERLQKSPAKMTPTKQAAFKESLKDSSSPGHDSPLDSKITPQKRHTQAGEGTSLETKTPRTPKRQGTQPPGFLPNCTWPHSVNSSPESPSCPAPPTSSTAQPRRECLTPIRDPLRTPPRAAAFMGTPQNQTHQQPHVLRAARAEEPAQKLKDKAIKTPKRPGNSTVTSSPPVTPKKLFTSPLCDVSKKSPFRKSKIECPSPGELDQKEPQMSPSVAASLSCPVPSTPPELSQRATLDTVPPPPPSKVGKRCRKTSDPMKEASSECQLDASATPGVGTADSPAAPTDSRDDQKGLSLSPQSPPERRGYPGPGLRSDWHASSPLLITSDTEHVTLLSEAEHHGIGDLKSNVLSVEEGEGLRTADAEKSSLSHPGIPPSPPSCGPGSPLMPSRDVHCTTDGRQCQASAQLDNLPASAWHSTDSASPQTYEVELEMQASGLPKLRIKKIDPSSSLEAEPLSKEESSLGEESFLPALSMPRASRSLSKPEPTYVSPPCPRLSHSTPGKTGGKPTSARPVPPPTSPSSTPSPFQTDGVPWTPSPKHSGKTTPDIIKTGPGGRGRWAVAPAPLPGGARSVQPSWEPVTAXVRGQGPRPXTQHPQDAHLGGFXARGSVPAPRPVASQEPACLRPRKPLPGDSLGXVPGRESCWPRKKLTVEPKGSVTXEKIQKLVRVKRGLQVGVHGSYPPRETKRCLFPAPPHLPAVPCGAPSPASALQALTQSPLLFQGKTPSSQSKDPR

SEQ ID NO: 12800 - protein, 79 aa, Homo sapiens
  misc_feature (1)...(79): Xaa = X or * as defined in Table 2
ILINHFFLESCSVAQAAVQWHNLSSLQPPPPGFKXFSYLSFLSSXDYKHAPPRPANFCIFSRDAVSPMLASWSQTPDLK

SEQ ID NO: 12801 - protein, 38 aa, Homo sapiens
WSPSPDLVIHPPRPPKVLGLQALHWVLKVNGHSTDIGL

SEQ ID NO: 12802 - protein, 87 aa, Homo sapiens
  misc_feature (1)...(87): Xaa = X or * as defined in Table 2
ETDLALSARLECSGTILAHRKLRLPGSRHSPASASQVGGTTGARTTPGXFFVFLVETGFHRVSQDGLDLLNLVIHPPWPPKVLGLQA

SEQ ID NO: 12803 - protein, 102 aa, Homo sapiens
  misc_feature (1)...(102): Xaa = X or * as defined in Table 2
IDTTFFFFFFFFFFETESLSVTRLECSGAILAHYKLRLPGSRHSPASASRVAGTTGARHHARLIFVYFLVEMGFHHVSQDGLDLLTSXSGPPRPPKSLGLQA

SEQ ID NO: 12804 - protein, 236 aa, Homo sapiens
  DOMAIN (39)..(50): TRANSFERASE GLYCOSYLTRANSFERASE domain identified by eMATRIX, accession number PD01966A, p-value=8.971e-13, raw score of 9.27
  misc_feature (1)...(236): Xaa = X or * as defined in Table 2
MAGAAPRLPWSRPHGSCGWWPMQPLQGPGRRAVAAAWEVATPVFMPVGTQATMKASRPNSWTLWVAASAWEYLPSGSKAGGTAAFPDGVAGVSVRGDGGGLRFRSPYDGNETLLSPENPCRSRMRWAPGVVTGALLQVNPLAGPVHAAHQRPDKQNLFAIIQVGWTQISGPPALKRFGSAWHSRAFLTHCCTVTTRPRCTTSRPQHRLPAELMSAVRTSIVEKRFPDSCGTSWAPX

SEQ ID NO: 12805 - protein, 99 aa, Homo sapiens
LFFPHSQSTKVFSTYEQIMCVCVFLFFCFFVFPETGSHSVTRLGCSGVIMAHCSFNLPGPSDPSTSASQVAGTTGVCHHAQLIFKFFVEPGQHTEIPSL

SEQ ID NO: 12806 - protein, 300 aa, Homo sapiens
  DOMAIN (143)..(184): TRANSFERASE GLYCOSYLTRANSFERASE domain identified by eMATRIX, accession number PD01966B, p-value=8.953e-24, raw score of 22.84
  DOMAIN (145)..(300): Queuine tRNA-ribosyltransferase domain identified by PFam, accession name TGT, E-value=5.2e-17, PFam score of 67.5
TVKMAGAATQASLESAPRIMRLVAECSRSRARAGELWLPHGTVATPVFMPVGTQATMKGITFEFLDALGCRICLGNTYHLGLRPGPELIQKANGLHGFMNWPHNLLTDSGGFQMVSLVSLSEVTEEGVRFRSPYDGNETLLSPEKSVQIQNALGSDIIMQLDDVVSSTVTGPRVEEAMYRSIRWLDRCIAAHQRPDKQNLFAIIQGGLDADLRATCLEEMTKRDVPGFAIGGLSGGESKSQFWRMVALSTSRLPKDKPRYLMGVGYVVDREARALPVGSGFLGTPYPAWGGGIWGKRTQV

SEQ ID NO: 12807 - protein, 223 aa, Homo sapiens
  DOMAIN (65)..(106): TRANSFERASE GLYCOSYLTRANSFERASE domain identified by eMATRIX, accession number PD01966D, p-value=7.525e-33, raw score of 19.10
  DOMAIN (4)..(201): Queuine tRNA-ribosyltransferase domain identified by PFam, accession name TGT, E-value=1e-14, PFam score of 35.9
  misc_feature (1)...(223): Xaa = X or * as defined in Table 2
EGLRPELQNLFAIIQGGLDADLRATWPXRDDQARNVPGFAIRGALSGEXEQSREFCAGWLAAEHTLGXPKDKPRYLMGVGYATDLVVCVALGCDMFDCVFPTRTARFGSALVPTGELQLRKKVFEKDFGPIRPGCTFPHVPKAPARAFLHATAAQXQHGPRCTTLTVHNIAYQLQLMSAVRTSIVEKRFPDFVRDFMGPMYGDPTLCPTWATDALASVGITLG

SEQ ID NO: 12808 - protein, 111 aa, Homo sapiens
  misc_feature (1)...(111): Xaa = X or * as defined in Table 2
AGVQWPDLSSLQPLPPGFKRFFHLGLPSSWDYRVHEAPRPANFLKFLVEMAFCHVGQAGLELLGSSDTPVLAFQSGITGESHLAWPVFNFXNGSFNVFSLRVINEHLALHL

SEQ ID NO: 12809 - protein, 172 aa, Homo sapiens
  misc_feature (1)...(172): Xaa = X or * as defined in Table 2
YYQNPPKKKLAASCGLSPVLQVLKSLKGEVLPLGETQHYFPLNRELRLLTQHFLLLMPLSQQTSKAGTIIARLIDPDYQGRTKFKIRNGKKILNGRRKEIAWNVGFSITPCLLWKVIGILEQSNMAIYWYIHPRMKVXASPPGKEQRPFEVTPEGQRNMEWLEEERNGRCLP

SEQ ID NO: 12810 - protein, 361 aa, Homo sapiens
AERQIEEENREREWEREVLGIKRDKSDSPAIQLRLKEPMDVDVEDYYPAFLDMVRSLLDGNIDSSQYEDSLREMFTIHAYIAFTMDKLIQSIVRQLQHIVSDEICVQVTDLYLAENNNGATGGQLNTQNSRSLLESTYQRKAEQLMSDENCFKLMFIQSQGQVQLTIELLDTEEENSDDPVEAERWSDYVERYMNSDTTSPELREHLAQKPVFLPRNLRRIRKCQRGREQQEKEGKEGNSKKTMENVDSLDKLECRFKLNSYKMVYVIKSEDYMYRRTALLRAHQSHERVSKRLHQRFQAWVDKWTKEHVPREMAAETSKWLMGEGLEGLVPCTTTCDTETLHFVSINKYRVKYGTVFKAP

SEQ ID NO: 12811 - protein, 48 aa, Homo sapiens
  misc_feature (1)...(48): Xaa = X or * as defined in Table 2
RWSDYVERYMNSDTTSPELREHLAQKPVFLPQGEXAMSICQQVHTVHD

SEQ ID NO: 12812 - protein, 55 aa, Homo sapiens
  misc_feature (1)...(55): Xaa = X or * as defined in Table 2
VFLVETGFRLLARLALNSXPCDPPASASQSVGITGESHCARPGTILMKHRGQLCT

SEQ ID NO: 12813 - protein, 121 aa, Homo sapiens
  misc_feature (1)...(121): Xaa = X or * as defined in Table 2
FLRWSFTLVAQAGIQWCGVSSLQPLPPGFKQFFCLSLPSSWDYRCPPPCPTNFXLLVEMGFHHVGQAGLELLTSGDLPASASQSAGITGISHRARPGTLFFXAVNGGGNQVFLFLRVLNGL

SEQ ID NO: 12814 - protein, 113 aa, Homo sapiens
  misc_feature (1)...(113): Xaa = X or * as defined in Table 2
FRPQSCXCPPADSRLFPATPEAVLSLLVKASPPPELPRSPPEKPTGLSGGALGXQRFSRAARNRGDPLTRKNSKITSLLSFLQELTKALEQKPDDAHILSSKSLLSHSSWELL

SEQ ID NO: 12815 - protein, 219 aa, Homo sapiens
  DOMAIN (9)..(21): MOLLUSCAN RHODOPSIN C-TERMINAL TAIL SIGNATURE domain identified by eMATRIX, accession number PR00239E, p-value=7.852e- 09, raw score of 1.58
  misc_feature (1)...(219): Xaa = X or * as defined in Table 2
RPPPAPAPGPQGPWPQGPYPXAESPPARSRTPHASQLPRCGPRPTADPSSAPSRRLRPTSRSRHCFPAAGSPGTPPQPPSADVRRVPPFSPLSSRWWXPFPQSCXRPPADSRRSRPPLRPSFRFLXKPARPQSSSVASREAKGPLVERQVDSVLAGPRETASSFATRPCATLPGKVTANCKPPQKTSGQLLVRGLSRSVAAYSSPFFGAPEIGEGEMPI

SEQ ID NO: 12816 - protein, 96 aa, Homo sapiens
  misc_feature (1)...(96): Xaa = X or * as defined in Table 2
ANFIAGVWSQSRFHALALHIIQQGSKKVPXANFIAGVWSQSRFHALALHIIQQGSKKVPIVSKLENDTAARHELFIAEWRKQCSEKKAQAKGWRQW

SEQ ID NO: 12817 - protein, 44 aa, Homo sapiens
MKMTSNFLLFSSGIFSSTFQIHLDVPLELQTQNTVMGCLMRIHP

SEQ ID NO: 12818 - protein, 100 aa, Homo sapiens
  misc_feature (1)...(100): Xaa = X or * as defined in Table 2
ETKSCSVAXAGVQRRNHGSMXRQPPGSSNPPISASRVFGITGICHRTHLIFLFFVETGSHYVAQGSSXTPEAQVIRLHQPPKLVFFYIFQLFLCFLLVCY

SEQ ID NO: 12819 - protein, 253 aa, Homo sapiens
  misc_feature (1)...(253): Xaa = X or * as defined in Table 2
FFFFFWSENDGHLDTGARFAPDRRHTGVGRTKDTQVGYRCHTAPARARGGWGEDGCLASXPGVRVKSRWSVPGAPGRGGQCHNPSGFPTXPGGRHRKQPRPGARVLQAGGQGQAFLPLAGWHLSGPGYWLSTPWACKGLGVVLSVTPLPPRSPWVGXGLGSRQAVEGRAAQGRYLSFCPGTQWXWPPSAPIPTGTXSEVAHTKGVPGPGEPPAARGLRTLTLAVGPGLPGSRLVQHPKRYRALQALTSCFCSA

SEQ ID NO: 12820 - protein, 278 aa, Homo sapiens; identical to SEQ ID NO: 10916
  DOMAIN (137)..(153): Protein kinases ATP-binding region proteins domain identified by eMATRIX, accession number BL00107B, p-value=6.786e-11, raw score of 13.31
  DOMAIN (73)..(218): Eukaryotic protein kinase domain identified by PFam, accession name pkinase, E-value=2.1e-52, PFam score of 187.5

SEQ ID NO: 12821 - protein, 263 aa, Homo sapiens
  DOMAIN (145)..(200): Ferritin iron-binding regions proteins domain identified by eMATRIX, accession number BL00540B, p-value=9.368e-29, raw score of 18.82
  DOMAIN (19)..(191): Ferritins domain identified by PFam, accession name ferritin, E-value=3.8e-39, PFam score of 134.8
  misc_feature (1)...(263): Xaa = X or * as defined in Table 2
PRDLPASASQSAGITGVSHRLRFYFDHQDVAPECGAYFFHELAKEKRKGVEXXNTLLAKMVSISXPRDLPASASQSAGITGVSHRLRFYFDHQDVAPECGAYFFHELAKEKRKGVERLLKMQNQRGGPAVFQDILKPGQDEWGKTLEAMEAAMAPGKNLNQSLLDLHALGSAPTDPHLCDFLESHFRDEEVTFMPRKSADLHAAGEAASLGGVSLNVMKGASLHALCLRLLNSFGPGVATLCGERVVHKNNRASALRKCIFWP

SEQ ID NO: 12822 - protein, 203 aa, Homo sapiens
  misc_feature (1)...(203): Xaa = X or * as defined in Table 2
RYDFFFFFFFFFFVTESRSGXLQSQAGVQLRDLGSLQAPPPRFTPFSCPASPSSWDYRRPPPRPANFFLYFYSMRRGFTVLARMVSISXPRHLPALASQRAGITGLSHCTRLFFFXWMESPSVTQAGIQWHDLGSLQPMPPQFRXFSWLSLPSSWDYRRPPPRPADFCTFSRDGVSPCXPGWSRSPDLVIHPPWPPKVLGLQA

SEQ ID NO: 12823 - protein, 99 aa, Homo sapiens
  DOMAIN (39)..(63): PROSTAGLANDIN D RECEPTOR SIGNATURE domain identified by eMATRIX, accession number PR00854E, p-value=6.612e-09, raw score of 10.50
  misc_feature (1)...(99): Xaa = X or * as defined in Table 2
RAEPPHLANHILFFXDRVSLCRPGWTAMAXTWLTVASTSRAQAVLPPSASPNSXDYRHVSPHPLIFVFSFLIMLSRMVSNSWAQGILLPWSPKVLELQA

SEQ ID NO: 12824 - protein, 93 aa, Homo sapiens
  misc_feature (1)...(93): Xaa = X or * as defined in Table 2
AGVKWGDLGSLQPPPPRFKRFSCLSLPSSWGYRHAPPXPGXFSVFLVKTGFLHVGQAGLELLTSGDLPVSASQSAGITGMSHCAWPTKALISK

SEQ ID NO: 12825 - protein, 115 aa, Homo sapiens
  DOMAIN (8)..(61): Clathrin light chain proteins domain identified by eMATRIX, accession number BL00224B, p-value=1.000e-40, raw score of 16.94
  DOMAIN (1)..(115): Clathrin light chain domain identified by PFam, accession name Clathrin_lg_ch, E-value=5e-14, PFam score of 60.0
  misc_feature (1)...(115): Xaa = X or * as defined in Table 2
SQVDRXQSEPESIRICREDHMERLQAFDANSRKQEAEWKEKAIKELEEWYARQDEQLQKTKANNRVADEAFYKQPFADVIGYVEEAFVNDIDESSPGTEWERVARLCDFNPKSLD

SEQ ID NO: 12826 - protein, 249 aa, Homo sapiens
  DOMAIN (130)..(183): Clathrin light chain proteins domain identified by eMATRIX, accession number BL00224B, p-value=1.000e-40, raw score of 16.94
  DOMAIN (27)..(244): Clathrin light chain domain identified by PFam, accession name Clathrin_lg_ch, E-value=1.5e-82, PFam score of 287.6
HRCGVGGSVGFCLTVGVRAVQLPAMAELDPFGAPAGAPGGPALGNGVAGAGEEDPAAAFLAQQESEIAGIENDEAFAILDGGAPGPQPHGEPPGGPDAVDGVMNGEYYQESNGPTDSYAAISQVDRLQSEPESIRKWREEQMERLEALDANSRKQEAEWKEKAINELEEWYARQDEQLQNTKANNRVADEAFYKQPFADVIGYVYVAKLIPFSTSDSFYFCLELMLLLCHKLLCFLNYFKLALWGLPKN

SEQ ID NO: 12827 - protein, 72 aa, Homo sapiens
VTHLSKKKFTHQPDAKCGNGWNNPTGSSTVKKMRRSLSTSSPIRSAHIVNSSGSRRARGILAKCILMSLVIW

SEQ ID NO: 12828 - protein, 114 aa, Homo sapiens
  misc_feature (1)...(114): Xaa = X or * as defined in Table 2
NSLGESANALGNQQPITQNVCPRFLMQAPGMAPSPSFIMNTLERKAFLKRFPWMSAPIQVGLVGFCLVFATPLCCALFPQKSSMSVTSLEAELQAXDPKRAHPELRRVYFNKGL

SEQ ID NO: 12829 - protein, 143 aa, Homo sapiens
  misc_feature (1)...(143): Xaa = X or * as defined in Table 2
LRQSLDSVAQAGVHWRDLGSRXAPPPGFTPSSCLSLPSSWDYWHPPRRPAVFLYFXERRGFTVLARMVSISXRRDPPASAPQSAGIIGMSHRARPQILFFIHIFSTVSAGINESXVCFYCIIILEVPSKEGILESXCISEAAH

SEQ ID NO: 12830 - protein, 284 aa, Homo sapiens
  misc_feature (1)...(284): Xaa = X or * as defined in Table 2
GAISAHRNLRFLGSSDSPASASQEHWGTETLAHXRSQLTATSASWVQVILLPQPPKNTGAQKHWPTEGEAKEHCVSDDSESTLKAGGQHRIKQGGNSSSGAREPAPNILNSRRSWWTLVAKAAAVTVIIRVILMAAILRGTLAKEVNWWVLDLTDFKNEAADPRARHKDSPSPHQTQEPSWLHSVDPTPGPQVELPASPTMCAGTSQPLVSRWDWSPWSRKRHIIFAPSSHNKYAGESFPGIYDAIFDIENKANSRLAWKEVKKHISIAAFTIQAAAGTLKEVL

SEQ ID NO: 12831 - protein, 258 aa, Homo sapiens
  misc_feature (1)...(258): Xaa = X or * as defined in Table 2
LANFCIFSRDGVSPXWSGWSRTPDLRXSTRVGLPKCXDYRREPPHPPGLLPVFSSHFAFGLFQRRRRLFVCFFAFLRQSLALVTQAGVQWHDLGSLQPPPPGFKXFSCLSLLSGWNYRCVPPRQANFCIFMXRRDFTMLARLVSNSXPQCDPPTSASQSAGITGVSHHARLAFVSCYTHTHTHTHTLAXIPFPSVFPPNSLSPPLQQGFCPHHCTELTSYLIKITNPVHVIRPNGHSALCILVQVSAPLHSWLSPLLE

SEQ ID NO: 12832 - protein, 138 aa, Homo sapiens
  DOMAIN (93)..(107): TRANSFORMING PROTEIN P21 RAS SIGNATURE domain identified by eMATRIX, accession number PR00449D, p-value=8.313e-14, raw score of 10.79
  DOMAIN (13)..(138): Ras family domain identified by PFam, accession name ras, E- value=1.1e-17, PFam score of 64.3
  misc_feature (1)...(138): Xaa = X or * as defined in Table 2
LDPGSLAGFTSYIQFMYDEFVEEYEPTKADSYRKKVAQDGEEVQIYIINTAGQEDYTAIKDNYFHCVFSITEMESFAATVDFKEQILRVKKDENIPFLLVGNKSDLEDKRQVSIEEAKNRADXWNVIYVETSPKTXAN

SEQ ID NO: 12833 - protein, 388 aa, Homo sapiens
  DOMAIN (158)..(199): kw TRANSCRIPTASE REVERSE II ORF2 domain identified by eMATRIX, accession number DM01354I, p-value=7.429e-23, raw score of 15.55
  DOMAIN (257)..(388): Ras family domain identified by PFam, accession name ras, E- value=8.1e-24, PFam score of 92.6
  misc_feature (1)...(388): Xaa = X or * as defined in Table 2
MMGGRLLTGGIPGEAAVWGCSRPSTAPSVFPPPPAAAAAAAAVSSGNLRLHPGQVPRVVLSREGGLAPRRGCPSKSGGSESTRVPRAGPRGESTGDRDPAPPPGPPSSSHHFSPLRIERKADKPPENSGESSHDVASREQPLVLLEAHFRWAILLACHSMPTVGRKQVNNEIKTEIKKFFETSENKDTTYQNLWDTAKISFFPDFSYNFFMPISVLDAGGGSETAKHHHQDVHEIQPHIEPQISLGSFEHPIFGSCTIKEGTYRKRVVLDGEEVQIGILETAGQEDYAAIRDNYFRSREGFLCVFSITEMESFAATADFREQILRVKEDENVPFLLVGNKSDLEDKRPVSVKEAKNRADQWNVNYVETSAKTQLMLTRHKPGTSSQSX

SEQ ID NO: 12834 - protein, 317 aa, Homo sapiens
  DOMAIN (131)..(154): TRANSFORMING PROTEIN P21 RAS SIGNATURE domain identified by eMATRIX, accession number PR00449C, p-value=9.250e-16, raw score of 17.27
  DOMAIN (92)..(317): Ras family domain identified by PFam, accession name ras, E- value=3.8e-78, PFam score of 273.0
LLLLLLLLLLLLQPPRLPRHPSDSSFDRSRRGAFQATRTEYPPGGATQPRLPEPSGRRTGSRCKFFLILWRKLRHKMAANKPKGQNSLALHKVIMGGSGGVGKSALTLQFMYDEFVEDYEPTKADSYRKKVVLDGEEVQIDILDTAGQEDYAAIRDNYFRSGEGFLCVFSITEMESFAATADFREQILRVKEDENVPFLLVGNKSDLEDKRQVSVEEAKNRAEQWNVNYVETSAKTRANVDKEWPFLKTRWWNTCKYISSHCPRPAPVSRKTAHWAEVFFDLMREIRARKMEDSKEKNGKKKRKSLAKRIRERCCIL

SEQ ID NO: 12835 - protein, 208 aa, Homo sapiens
  DOMAIN (154)..(177): TRANSFORMING PROTEIN P21 RAS SIGNATURE domain identified by eMATRIX, accession number PR00449E, p-value=6.625e-18, raw score of 13.50
  DOMAIN (16)..(208): Ras family domain identified by PFam, accession name ras, E- value=2.9e-47, PFam score of 170.4
  misc_feature (1)...(208): Xaa = X or * as defined in Table 2
MAANKPKGQNSLALHKVIMVGSGGVGKSALTLQFMYDEFVEDXEPTKADSSRKRVVLDGEEVQIGYPLDTAGQEDYAAIRDNYFRSGEGFLCVFSITEMESFAATAEFREQILRVKEDENVPFLLVGNKSDLEDKRQVFSRKRQKNRAEQWNVNYVETSAKTRANVDKVFFDLMREIRARKMEDIYYLNGTKNTKRLAERIREGGCIL

SEQ ID NO: 12836 - protein, 58 aa, Homo sapiens
  misc_feature (1)...(58): Xaa = X or * as defined in Table 2
WGFTMLARLVLNSXSQVIHPPWLPKVLGLQALGSGSLHRSFFISVKGSSGFTAPSRRL

SEQ ID NO: 12837 - protein, 44 aa, Homo sapiens
  misc_feature (1)...(44): Xaa = X or * as defined in Table 2
RGQRLPVSRKWLLGTEEAWALRXSTRLSLPKCWDYRHEPPCPAH

SEQ ID NO: 12838 - protein, 84 aa, Homo sapiens
VPTNTPPAPEEEATGGRQVTAPCSYPEMTSAQPGTYWMCPQETPPGPHPPGRNPASQKEAPRCTSAWESCPPSGRPARQALYRA

SEQ ID NO: 12839 - protein, 96 aa, Homo sapiens
  misc_feature (1)...(96): Xaa = X or * as defined in Table 2
DKIFFFFFXDRVSLCRPGWSSVARSRLTATSASQFKQFSCLSRPSSWDYRHVPPRPANFCIFSRDRSFTMLVRLVLNSXPQVIHLPRPPKVLGLQA

SEQ ID NO: 12840 - protein, 195 aa, Homo sapiens
  DOMAIN (62)..(79): Zinc finger C2H2 type, domain proteins. domain identified by eMATRIX, accession number BL00028, p-value=4.522e-12, raw score of 16.07
  DOMAIN (4)..(110): Zinc finger, C2H2 type domain identified by PFam, accession name zf-C2H2, E-value=4.9e-33, PFam score of 123.2
  misc_feature (1)...(195): Xaa = X or * as defined in Table 2
KKPYECKECGKAFSSGSNFTQHQRIHTGEKPYECKECGNAFSQSSQLIKHQRIHTGEKPYECKECEKAFRSGSDLTRHQRIHTGEKPYECKICGKAYSQSSQLISHHRIHTSEKPYEYRECGKNFNYDPQLIQHQNLYWXXNRIYEMCREAFNYGSKQNLSCXXFLXIEXCSKHFICGLQLIQPGKNNVGEILYE

SEQ ID NO: 12841 - protein, 117 aa, Homo sapiens
  misc_feature (1)...(117): Xaa = X or * as defined in Table 2
LFLSFLFFSFFFFFETGPHSVAQAVVQWLNHGSLQPQLSGFKQSFRLRLLSGXDYRCTPLRLASFXFFVEMGCHYVAQAGLQLLDSGDLPASASQRAGITDVSPCIWPPMSCYVKRT

SEQ ID NO: 12842 - protein, 320 aa, Homo sapiens
  misc_feature (1)...(320): Xaa = X or * as defined in Table 2
TQPWYRHGGGGPKTLRQRSWSPCQAYHVPHACPSHHKNLSSRPRPWCPPNATNMLLSLKALQPPTLLSPLPXQVCRQGKNPPKQRCRGPGATHHIPVHLWHSGWPLLHTLPARISAVQPSFPFPKETLGQAELQNRWVPLGPGKQVLRERPLSHQREKREAQLTPRLLARRPQAGEAAARRQGKGTAEGERGXXDGPSKPSLVRARVRKRAGPKQGPSASAXPGPSTPNPPTTQGSHWPREQAPAPTPMSSEEPNVLSQQTARPRPSPGTGMGVGVLKPFVSVPGALAKLTMCPMHVLHITKTCPAAQGHGVHRMPQTCC

SEQ ID NO: 12843 - protein, 22 aa, Homo sapiens
WSRSPDLMIRLPRPPKVLGLQA

SEQ ID NO: 12844 - protein, 38 aa, Homo sapiens; identical to SEQ ID NO: 12801

SEQ ID NO: 12845 - protein, 104 aa, Homo sapiens
  misc_feature (1)...(104): Xaa = X or * as defined in Table 2
ISFFLSFFLSFFFFFEAESRSFTQIGVCSGTISAHCKLCLPGSHPSPASASXVAGTTGARHHTRLIFLYFXXKTGFHRFSRDGLDLLNLVIRPPRPPKVLGLQA

SEQ ID NO: 12846 - protein, 91 aa, Homo sapiens
  misc_feature (1)...(91): Xaa = X or * as defined in Table 2
LRWSFSLVVQAGVQWCDLGSLQPPPSGFKXLSCLSLPSSWDYRSAPPCPANFVFLVETGFLHVGQACLELLTSSDLSTSASQSAGITRREQ

SEQ ID NO: 12847 - protein, 58 aa, Homo sapiens
  misc_feature (1)...(58): Xaa = X or * as defined in Table 2
VRVLQIYHSLRLPGSHHPPRGDRLQGRGFLTACQPCXSTYCXTFPPGVLGNTGRDLLL

SEQ ID NO: 12848 - protein, 686 aa, Homo sapiens
  misc_feature (1)...(686): Xaa = X or * as defined in Table 2
MSSQEVTFEQRPEGDEGGAVELSRQQTQQERRRQLGQTQLMYKWAKPKICSEDLEGAVKLPASGVKTHCPPCNPGFFKTNNSTCQPCPYGSYSNGSDCTRCPAGTEPAVGFEYKWWNTLPTNMGTRPFSVGSTSSTRCMTGWEVAGDHIYTAAGASDNDFMILTLVVPGFRPPQSVMADTENKEVARITFVFETLCSVNCELYFMVGVNSRTNTPVETWKGSKGRQAYTYIIEENTTTSYTCAFQRTTFHEASRKYTNDAAEIYSIICHPCYXMPWASYAGPCAQKASEEGSSCTSCPAGYYIDRDSGTCHSCPPNTILKAHQPYGVQACVPCGPGTKNNKIHSLCYNDCTFSRNTPTRTFNYNFSALANTVTLAGGPSFTSKGLKYFHHFTLSLCGNQGRKMSVCTDNVTDLRIPEGESGFSKSITAYVCQAVIIPPEVTGYKAGVSSQPVSLADRLIGVTTDMTLDGITSPAELFHLESLGIPDVIFFYRSNDVTQSCSSGRSTTIRVRCSPQKTVPGSLLLPGTCSDGTCDGCNFHFLWESAAACPLCSVADYHAIVSSCVAGIQKTTYVWREPKLCSGGISLPEQRVTICKTIDFWLKVGISAGTCTAILLTVLTCYFWKKNQKLEYKYSKLVMNATLKDCDLPAADTCAIMEGEDVEDDLILTSKKSLLGEDQIIYLQEDS

SEQ ID NO: 12849 - protein, 67 aa, Homo sapiens
PHHYAVLLFYRLGLSRIAVSLALAICDWLNALYQRLHFARRSGSTLCNNCLRCIADRHLHYVGNITV

SEQ ID NO: 12850 - protein, 366 aa, Homo sapiens; identical to SEQ ID NO: 8125
  DOMAIN (202)..(220): CYTOCHROME B-245 HEAVY CHAIN SIGNATURE domain identified by eMATRIX, accession number PR00466E, p-value=1.000e-21, raw score of 6.82
  DOMAIN (1)..(365): Ferric reductase like transmembrane com domain identified by PFam, accession name Ferric_reduct, E-value=1.1e-35, PFam score of 132.0

SEQ ID NO: 12851 - protein, 142 aa, Homo sapiens
KYCSQIYYLNRAAVRCRQKGLIAQVDLFLVGQCSSQLLWASYFTQMLTQTTATTLVHGNVLSPPSLYANTEAMATRRSQTWSPGSRSACERCSWRSMSSSLTRSSAVTARGSAPKPRCSCCWPLRSRTSRRCWWPSGATGFG

SEQ ID NO: 12852 - protein, 117 aa, Homo sapiens
  misc_feature (1)...(117): Xaa = X or * as defined in Table 2
FEIGSCSITQAGVQRHDLCSPLPPPPGFKQSPRPSLPSSXDHRCAPPCPASFCIFXXRQGFHHVGQAGLELLTSGDPPALASQSAGITGVSHQAWPPFGFLDRTLSIVSQKTNTNRP

SEQ ID NO: 12853 - protein, 96 aa, Homo sapiens
  misc_feature (1)...(96): Xaa = X or * as defined in Table 2
RYDLALWPRLECSGAITARCNLKLLGSSNSPTSTSCICXGYRLIFFKFFVDTGSCYVAQAGFKLPASSDPPPPKMLRYRPGHHARLCLTVNRTNVP

SEQ ID NO: 12854 - protein, 98 aa, Homo sapiens
  misc_feature (1)...(98): Xaa = X or * as defined in Table 2
TGSRSVAQAGVQXHDYQGSLQPPPPRPMXSSHLSLPRNWDYSHTAPHPAKLFFFLDTGSHYVAQAGLKLLGSSDPSTSASQSAGITGMSHRIQPHISF

SEQ ID NO: 12855 - protein, 104 aa, Homo sapiens
  misc_feature (1)...(104): Xaa = X or * as defined in Table 2
FIYLFRDGVLLCCPGQSAVAFLRLTVTSTFLXSPDGELLTLXSTRLGLLKWWDYKGEPPRPVFLFCFLNVXXRCSLAMLSRLVLNSXAQAIFLPQPSKVLGLQG

SEQ ID NO: 12856 - protein, 146 aa, Homo sapiens
  misc_feature (1)...(146): Xaa = X or * as defined in Table 2
FFFFFSRLENFEFYNKPFCTNPGPRGPPRVGPPFAPRRGAFSLPQGGPFXSLLFSPRPNPSGPLVRPGLPPTGALPCSVRXVDRSPLPYMVSPGPPGGLRGGAGPGPVHPRGPEAPPRARGRGREGGPAESVTRFPWQLRGGHFQP

SEQ ID NO: 12857 - protein, 45 aa, Homo sapiens
PASLSTNEAEHEMSLFSFQKPLNVTVIRRGGKHQLRLVPTRWAGK

SEQ ID NO: 12858 - protein, 289 aa, Homo sapiens
EYVDYNGGAGVQHIALKTEDIITAVRTPFPVRIPLSFRARDDLCKIERAGGGSPGPVSLGWETDRTPSLLLATHGQAQPHPPPESSVSTEPLGFGGLQNDHKAVMKQVEEALHQLHARDKEKQARDMAEAHKEAMSRKLGQSESQGPPWAFAKVNSISPGSPASIAKTQRGSKSKLSLQLEDAETDELLRDLSTQIEFLDLDQISPEEQQISSPERQPSGELEEKTDRMPQDELGQERRDLEPENREEGQERRVSDIQSKAGISRESLVSSTTEDILFQKDKSTPVYPL

SEQ ID NO: 12859 - protein, 288 aa, Homo sapiens
  misc_feature (1)...(288): Xaa = X or * as defined in Table 2
TVLAFADGCGVLAHGRSRSYGRLGRRPYSREPGLWSRGPGFTMSDEEARQSGGSSQAGAVTVSDVQELMRRKEEIEAQIKANYDVLESQKGIGMNEPLVDCEGYPRSDVDLYQVRTARHNIICLQNDHKAVMKQVEEALHQLHARDMEKQARDMAEAHKEAMSRKLGQSESQGPPRAFAKVNSISPGSPASIAGLQVDDEIVGVSGSVNTQNFQSLHNIGSVVQHSEGGPGTHHPTFCLYEFDYSRDLIXKPLNVTVIRRGEKHQLRLVPTRWAGKGLLGCNIIPLQR

SEQ ID NO: 12860 - protein, 223 aa, Homo sapiens
  misc_feature (1)...(223): Xaa = X or * as defined in Table 2
GNGILLMVHHHCDAGTVIMRADRFIPGEDQKNRVLVNTVLVRISRAVDGKHLSAGIRHTVFRICHNACTQHRGLFRGFNVFGEFLRFAFYILIVKENADQCAGFVGIIELGEIDRVMQALPDVEQAVTHACVINQAAATGGDARQLVGYLVSQSGFNINGNRHLTTTINPVGFPADKXGFPLMLPRVSGRNQHRISRVYLPCTATTLLRPGNGPPPSSVRPRR

SEQ ID NO: 12861 - protein, 158 aa, Homo sapiens
  misc_feature (1)...(158): Xaa = X or * as defined in Table 2
TPVRDMAEAHKEAMSRKLGQSESQGPPRAFAKMNSIEPRLPQPSIAGLQVDDEIVEFGSVNTPQDFQSLQNNGNVVQHSEGKPPECDQXSARGEKHQLKLVPKNAGPGKGLLGCNIIPSAKDELSPRGNSKQEKHPSPCPRTWVLGDFPTCPSSPLKA

SEQ ID NO: 12862 - protein, 312 aa, Homo sapiens
  DOMAIN (180)..(218): Synapsins proteins domain identified by eMATRIX, accession number BL00415O, p-value=5.855e-09, raw score of 3.44
  misc_feature (1)...(312): Xaa = X or * as defined in Table 2
KKQNFIYTVHGFSCCLGRGKGQDRDGWESRDGRFLSRSLTFPQFAIIRLVGQKEFSMLPKSFTLQILPRGSLSLPDPQEQLSKXSMPHRAVQSPSRHALGNPKTAREGSAPRSPLTGRPRPPVAAGXCRACRGAPQVARPPQGDQHRGFRGAHSDWRVWRGWASPSLLPRSSSSSGIANQASPVPESPGERSRPALGGRSGSSPCRRPPPKPPWRGAGSXSGTWRRWLAGWRTRRPRAPGCARPARPGPPSWPSRPQTGLAAGLSGAPSVPSCRRCTPRRSRPPLPARWTPPGAPACRRRPWSXSPGSTTAA

SEQ ID NO: 12863 - protein, 104 aa, Homo sapiens
  misc_feature (1)...(104): Xaa = X or * as defined in Table 2
FFFFFLRQSLDSVAQAGAQGHNPGPLQAPPPRFTPFSRLSLPSSWDHRRPPPCPTNFSAFPVETGFTVLARMVSISXPCDLLTSASQSAGTTGTSHRARPIIFK

SEQ ID NO: 12864 - protein, 253 aa, Homo sapiens
  misc_feature (1)...(253): Xaa = X or * as defined in Table 2
LAIYKHAGGVFSFILLQTLNTYGPGQDTKGSVLAYWRLPGLCIIIYLVKQSAKDFFSYYDINRQSVSKLQNVEQLPPDEIKELRQTTMPAGVDKSSTDQKYVQAGRRLGKVIQQSRLNCFPLVSYIIETCLFILWRHLEYYLLHCMPTDSQKSLFASRTLFXKQKDCQGFPSPQETQSXDFXKVGLAYSEANHGFXTQLSGLMPINGFLENHYPKRNFLDIEGLYISKVRFFGYSFIQALVRRIRGLLRISRN

SEQ ID NO: 12865 - protein, 79 aa, Homo sapiens
  misc_feature (1)...(79): Xaa = X or * as defined in Table 2
TLPISIYQSSPSGFHNYQFLASGVGATLPITPHPTSELPYRVPSPPSPSPRPPSXFSRTFQPPVPGPAHXPPDEIVEPG

SEQ ID NO: 12866 - protein, 473 aa, Homo sapiens
  DOMAIN (193)..(244): Neuromodulin (GAP-43) proteins domain identified by eMATRIX, accession number BL00412D, p-value=9.120e-10, raw score of 16.54
  misc_feature (1)...(473): Xaa = X or * as defined in Table 2
AEPDTSPIXTPGQSGSSXGNTSEPWTVTPPGLKMQQRVLCCTLXPPRRLPVCRPAAGXTRLDRAXESGHPGPAVPREATGVPGALPAQASVRSIWPALATCVATTVQTSTDAEVARQGICPAPHPAYPPAXPALCCPARADPRGRVLQXXADAVPGPPAIXAVHRAVSHPGGAQCPHPNPPAPQARVPRETCLPALQLAAPVLRGAGATAASAPTEEEEEACLEEEEEEEDSDEEDQRSGKDSEAWVPDSEERLILREEFTSRMHQRFLDGKDGDFDYSTVDDNPDFDNLDIVARDEEERYFDEEEPEDAPSPELDGDXWPPPFPPPAPSPSPTRQLIPGLLSDPFSRGTSAAVPHNPHTPPSHWVXSHLRQPPPPLFLGFPFSSLPPCLLPLSFLVSVWASFCLFLSFCLSPYPRSLFPVLWLAVSPFLPLSLCLRLCLHRRAQGESPPLAGGQLAGPFVAGSGQFGSGADP

SEQ ID NO: 12867 - protein, 183 aa, Homo sapiens
  DOMAIN (5)..(51): Vertebrate metallothioneins proteins domain identified by eMATRIX, accession number BL00203, p-value=8.085e-10, raw score of 13.94
  misc_feature (1)...(183): Xaa = X or * as defined in Table 2
GWLDLGLTKCVCXNAEVPTCEWVRLMCMSVCASKCGGGCGCLCMASGHCECLGMCWSLXACVFLSKNECLCVSLGTCQCLCLCVPVSHHLCIRVAHAASLCAMVCQCLCVDGWPMSDPRQGRPGWLDPAHLPSGSLALWVRVTEAFCGLKTGCSGSALRVAGGLPSLLPFRLVKRTPGGQGAV

SEQ ID NO: 12868 - protein, 291 aa, Homo sapiens
  DOMAIN (137)..(166): CALPAIN CYSTEINE PROTEASE (C2) FAMILY SIGNATURE domain identified by eMATRIX, accession number PR00704I, p-value=5.286e- 15, raw score of 9.52
  DOMAIN (57)..(173): Calpain large subunit, domain III domain identified by PFam, accession name Calpain_III, E-value=9.5e-05, PFam score of -30.3
  misc_feature (1)...(291): Xaa = X or * as defined in Table 2
GFLGLEGPLSSSPQVAWATVPLWAQLQGGLAGSCLGQILAPGPSEARDWWASLAGPXERVEGADRPWRFHLSTPEALVLAAGRSKARASDPGRSSTLSLLHVLKVEKRRVNLPRVLSMPPVAGTACHAYDREVHLRCELSPGYYLAVPSTFLKDAPGEFLLRVFSTGRVSLSAIRAVAKNTTPGAALPAGEWGTGPIPGCSWKFGQTAGGHKNFASYPTNPCVPLFGSPKGPGPRCVRITLHQHCRASDTEFHPIGFHIFQVPEGGRSQDAPPLLLQDPLLSCVPHRTPRR

SEQ ID NO: 12869 - protein, 84 aa, Homo sapiens
DSSKYRLFYIDAFSPAPAGNQGPPPMMGMNMNNRATIPGPPMGPGPAMGPEGAANMGTPMMPDNGSSCTMTDFLKGPPSQMGFT

SEQ ID NO: 12870 - protein, 338 aa, Homo sapiens
  DOMAIN (270)..(324): Tubulin subunits alpha beta, and gamma proteins. domain identified by eMATRIX, accession number BL00227F, p-value=1.000e- 40, raw score of 21.16
  DOMAIN (187)..(321): Tubulin/FtsZ family domain identified by PFam, accession name tubulin, E-value=1.9e-83, PFam score of 290.6
MEPEMELISITTGKTACEDLTTESKMNSVFWKIRFTYSSSRISSDEYTTSWASVFVNRNLKRRYDVHIAHIIRHRLHASYDTSNICLSEKDYIFPSFMKLQGESHLIQLRHGKVIAIWSTLDMGREREQPPRFAQPGTYASRWKALEEMEKQQREQVDRNIREAKEKLEAEMEAARHEHQLMLMRQANQMVKCDPRHGKYMACCMLYRGDVVPKDVNAAIATIKTKRTIQFVDWCPTGFKVGINYQPPTVVPGGDLAKVQRAVCMLSNTTAIAEAWARLDHKFDLMYAKRAFVHWYVGEGMEEGEFSEAREDLAALEKDYEEVGVDSVEAEAEEGEEY

SEQ ID NO: 12871 - protein, 504 aa, Homo sapiens
  DOMAIN (82)..(127): CARCINOEMBRYONIC ANTIGEN PRECURSOR AMINO-TERMINAL DOMAIN domain identified by eMATRIX, accession number DM00372B, p-value= 8.750e-37, raw score of 20.31
  DOMAIN (105)..(487): Immunoglobulin domain identified by PFam, accession name ig, E-value=8.1e-07, PFam score of 27.0
MGPLSAPPCTQRITWKGLLLTALLLNFWNLPTTAQVTIEAEPTKVSKGKDVLLLVHNLPQNLAGYIWYKGQMKDLYHYITSYVVDGQIIIYGPAYSGRETVYSNASLLIQNVTREDAGSYTLHIVKRGDGTRGETGHFTFTLYLETPKPSISSSNLYPREDMEAVSLTCDPETPDASYLWWMNGQSLPMTHSLQLSKNKRTLFLFGVTKYTAGPYECEIRNPVSASRSDPVTLNLLQHSWLIDGKFQQSAQVFFIPQITKTYRGVYVCFIHNSATAGTNLIIKRIIVPDTLRKRGNHEKVESSDDIENSNQPFSHPKAFKNIQVQHGQYGIHRKLITKLEKWLDSGLPCVISAETSSPRPGCSVSSGFQGHGKSHYYSSLECPWKWKLQRNHIYGGKVGWNLEGAHQLHIPAKLPKPYITINNLNPRENKDVLAFTCEPKSENYTYIWWLNGQSLPVSPRVKRPIENRILILPSVTRNETGPYQCEIQDRYGGIRSYPVTLNVL

SEQ ID NO: 12872 - protein, 221 aa, Homo sapiens
  DOMAIN (83)..(92): AMP-BINDING SIGNATURE domain identified by eMATRIX, accession number PR00154B, p-value=3.647e-10, raw score of 9.53
  DOMAIN (11)..(221): AMP-binding enzyme domain identified by PFam, accession name AMP-binding, E-value=1.1e-07, PFam score of -138.4
LPHPAVAVIQNVRSCRGFHGSPTLVVIPGNPRHSRTITLIKLLHGIIVIIGRVKFQRHPGCGQAKFIFFTLRQNKPNVVSGSTGRPKGVMVGQTAIVNRLLWMQNHYPLTGEDVVAQKTPCSFDVSVWEFFWPFIAGAKLVMAEPEAHRDPLAMQQFFAEYGVTTTHFVPSMLAAFVASLTPQTARQSCATLKQVFADLCREWQQLTGAPLHNGLCVFLMR

SEQ ID NO: 12873 - protein, 921 aa, Homo sapiens
  DOMAIN (266)..(321): Tubulin subunits alpha beta, and gamma proteins. domain identified by eMATRIX, accession number BL00227B, p-value=1.000e- 40, raw score of 19.29
  DOMAIN (216)..(568): Tubulin/FtsZ family domain identified by PFam, accession name tubulin, E-value=8.3e-237, PFam score of 800.1
  misc_feature (1)...(921): Xaa = X or * as defined in Table 2
QQKAAGVLPGKFYGTVFPWQRAGQQFQTDKAKGLTFLGGKAVHLSXHLEREQPPRFAQPGTYASRWKALEEMEKQQREQVDRNIREAKEKLEAEMEAARHEHQLMLMRQDPGLALVSCMQQGQSMSRSPKKVFKHLYELNLTKLQSLGSRSRLRWKDSPFWGEEAGGKRPPLVSLALHRSPSLLLLFVPKHPSKGRPDCTVQRSPKPTEKSQLLDLRECISIHVGQAGVQIGNACWELYCLEHGIQPDGQMPSDKTIGGGDDSFNTFFSETGAGKHVPRAVFVDLEPTVVDEVRTGTYRQLFHPEQLITGKEDAANNYARGHYTIGKEIVDLVLDRIRKLADLCTGLQGFLIFHSFGGGTGSGFASLLMERLSVDYGKKSKLEFAIYPAPQVSTAVVEPYNSILTTHTTLEHSDCAFMVDNEAIYDICRRNLDIERPTYTNLNRLIGQIVSSITASLRFDGALNVDLTEFQTNLVPYPRIHFPLATYAPVISAEKAYHEQLSVAEITNACFEPANQMVKCDPRHGKYMACCMLYRGDVVPKDVNAAIATIKTKRTIQFVDWCPTGFKVKQGFLLGLDPLLLPSSATSLHGGTGDVCRVLWCDLSSSLPPVDNSTCFSGGGRGVKQTLWESLVVVLFSALALLNAGYARSEADWGHSSDAFSPAPAGNQGPPPMTGMNMNNRATIPGPPMGPGPAMGPEGAANMGTPMMPDNGAVIMASMSFQCCLEAFGVTLDSAFSPYPCLLNSIFSQQMLSALSSKCIPCPITSVKVLNDWVPTAPTPSVPTPSAPTPFVPAPSALLTSTAPTPSALLTSTAPTPSAPTPFTPAPSALLTSTAPTPSAPAPSALLTSTAPTPSAPTPSVPAPSALLTSTASTPPAPILSASTSAAPTPSAPTLSAPTICCTYIICTYTLCTYILRIYTL

SEQ ID NO: 12874 - protein, 496 aa, Homo sapiens
  DOMAIN (44)..(63): Eukaryotic  RNA-binding region RNP-1 proteins domain identified by eMATRIX, accession number BL00030A, p-value=1.000e- 12, raw score of 14.39
  DOMAIN (45)..(112): RNA recognition motif. domain identified by PFam, accession name rrm, E-value=4e-08, PFam score of 40.4
  misc_feature (1)...(496): Xaa = X or * as defined in Table 2
PREPTPPAPPRLQRTTRTRRCGFTIDIKSFLKPGEKTYTQRCRLFVGNLPTDITEEDFKRLFERYGEPSEVFINRDRGFGFIRLESQNPWAEIAKAELGRAPFLKSRPLRICFRLHMGAAFDCSRNLFSSLFFQLSCLEQAFSQFGSVEKAGVVVDDRGRPTGKGFVEFASKNLPATKRLWKRCCDGAFLLTTTPRPSPLWKPMEQFDDEDGLAQRLLMHKTQQYHKEREQPPRFCSTWGHLKFEYQSRWKALDEMEKQQREQVDRNIREAKEKLEAEMEAARHEHQLMLMRQDLMRRQEELRRLEELRNQKLQKRKQIQLRHEEEHRRREEDMIRHQKQEGLRRQQEGFKPNYMENREQEMRMGDMGPRGAINMGDAFSPAPAGNQGPPPMMGMNMNNRATIPGPPMGPGPAHGTRRSRKYGNSQXCQIMEQCTNDRFPQGPPSQMGSPMGSRTRFXNPLKHPMSGVGPVSGGPGGFGRGSPGGNFEGPNNRRRY

SEQ ID NO: 12875 - protein, 84 aa, Homo sapiens
  misc_feature (1)...(84): Xaa = X or * as defined in Table 2
HNVHCXVPCGEVGSVIHCWWNGDNLIXPSXKVSWKYESRAFKTSRPLDPTPLLLGIQSKXYNKGHKDLDIRILITALFVVTKKL

SEQ ID NO: 12876 - protein, 149 aa, Homo sapiens
  misc_feature (1)...(149): Xaa = X or * as defined in Table 2
WGPEPXPTRPTLDEGPGCPGCGCSPSLPMGPPRGRGPPTSMSLLCRWPGVPLGSPPGCPPRARVKLFPHPGPDVSTSPPWAGHGAHQDPXGPVSGSESPPPAGHWAPPASTSSPKIQAGLXPEGMRTAQPPSVAVGSPQGSFRHKEGWG

SEQ ID NO: 12877 - protein, 68 aa, Homo sapiens
  misc_feature (1)...(68): Xaa = X or * as defined in Table 2
GSLXSPSPRFKRFSCLSLLSSWDYKHVPPHLANFCIFXRDWVSPCWLGWSRTPDLHLSWPPKVLGLPS

SEQ ID NO: 12878 - protein, 123 aa, Homo sapiens
  misc_feature (1)...(123): Xaa = X or * as defined in Table 2
AFPDKLPWNFRLCQVNRCGISEWAGMSEMGMSDIQLSVGKLVARCWLQAELXGXQFTKQERCPSLTRSRWHGQPREGQAERPFLCAPPEGAPIGFLRXHHLRVQLAMAWIKFKMLGQSPLPYI

SEQ ID NO: 12879 - protein, 55 aa, Homo sapiens
PFCRPPRADSVTKQERCPSLTWIRWHGQPQGGQAERPFLRAPPEGASTGFLRQHH

SEQ ID NO: 12880 - protein, 109 aa, Homo sapiens
  misc_feature (1)...(109): Xaa = X or * as defined in Table 2
FFLYLFLFLFLRWSLDSVIQAGVQWHDICSLQPLPPGFKXFSDCSTVLQPGRQSETGLKYFFITVXEMESCSVIQAGVQWHDNLFPATSASWVQVILRLLHCTPAWATE

SEQ ID NO: 12881 - protein, 124 aa, Homo sapiens
  misc_feature (1)...(124): Xaa = X or * as defined in Table 2
VRPHEGARAGPGGRGRGDPGLGARALPQPRVAVAGAACQPPSRLRHAGHRGPMVHAVGGSTFLGFGRQXLSSHSSTRQCPSRDSVWGLQPHISLLHCPSRGSPXGPHPCHRLLPGHPGISIHLL

SEQ ID NO: 12882 - protein, 106 aa, Homo sapiens
  misc_feature (1)...(106): Xaa = X or * as defined in Table 2
KRGSLSGCPRPRVQWRKTLAQLQPSKLPGLKXTFPCLSLLKXTGTHTCAPLCPNFFVFLTYLIEMGLTMLPRLVSYFWPQVFPSLASQSTGITGVSHHALAWWSMQ

SEQ ID NO: 12883 - protein, 200 aa, Homo sapiens
  DOMAIN (104)..(126): UvrD/REP helicase domain identified by eMATRIX, accession number PF00580A, p-value=7.000e-19, raw score of 13.37
  DOMAIN (88)..(138): UvrD/REP helicase domain identified by PFam, accession name UvrD-helicase, E-value=1.7e-15, PFam score of 59.5
  misc_feature (1)...(200): Xaa = X or * as defined in Table 2
FNRRILKINGLTREQTSGVQQQIRQALSALPLPVNRLEEFDNCREAWRKCQAWLKDIESARLQHNQAYTEAMLTEYADFFRQVESSPLNPAQARAVVNGEHSLLVLAGAGSGKTSVLVARAGWLLARGEASPEQILLLGLVAKPLKRWTSGFANGYIPKTLPHARFMRXALHIIQQGSKKVPIVSKLENDTACRHELFIA

SEQ ID NO: 12884 - protein, 86 aa, Homo sapiens
  misc_feature (1)...(86): Xaa = X or * as defined in Table 2
PCPPNTINCPLGLRLPCPPHLCPSLCLGKVGGPXKVPQTPSLGETELEQKKPPVPMASGWTGGRNGGWEKSLRGKERRVFSQEGFP

SEQ ID NO: 12885 - protein, 215 aa, Homo sapiens
  misc_feature (1)...(215): Xaa = X or * as defined in Table 2
QYFPTATHGNVKKSLLSGKASLKRLHRVCCSCLFYIVQKQPKLNKTLFRQSYICDQTTFRKSKGIINIKFIFFFFEMESRSVAQAGMQWRNLGSLQPPPPGFMPLSCLSLLSSWDYKRPPPCPANFFVFLVETGFTVLARMVSISXPCDLPASTSQSAGITDVSHHAWHIKFKPEVTWRERGREEHVDRHIFRLLDIRFTDTHFIKKELMRSDTL

SEQ ID NO: 12886 - protein, 76 aa, Homo sapiens
  misc_feature (1)...(76): Xaa = X or * as defined in Table 2
CLSLLSSXYYGRMSPRPANFXFLVETGFHHIGEAGLELLTLGDPPASASQGAGITGVSQRGQSLFAFLMSSTSFCK

SEQ ID NO: 12887 - protein, 94 aa, Homo sapiens
  misc_feature (1)...(94): Xaa = X or * as defined in Table 2
QAGVQWHDLGSLQPPLPGLKQFSCLSLPSSWDYRRVPPRLANFCDFLVETEFHHVGQADLELRTSGNLPTSASQSAGITGVSHHAXPKVLGLQV

SEQ ID NO: 12888 - protein, 236 aa, Homo sapiens
  misc_feature (1)...(236): Xaa = X or * as defined in Table 2
ERLRYFRVEHLDQRLKAAENKFSYCLMTWLKCGFWCLEKFIKFLNRNAYIMIAIYGTNFCTSARNAFFLLMRNIIRVAVLDKVTDFLFLLGKLLIVGSVGILAFFFFTHRIRIVQDTAPPLNYYWVPILTVIVGSYLIAHGFFSVYGMCVDTLFLCFLEDLERNDGSAERPYFMSSTLKKLLNKTNKKAAESXRLRYFRVEHLDQRLKAAENKFSYVPHDLAQMRLLVPGEVHQIP

SEQ ID NO: 12889 - protein, 267 aa, Homo sapiens
  DOMAIN (230)..(257): TRANSMEMBRANE FOUR FAMILY SIGNATURE domain identified by eMATRIX, accession number PR00259D, p-value=6.250e-23, raw score of 13.50
  DOMAIN (10)..(256): Transmembrane 4 family domain identified by PFam, accession name transmembrane4, E-value=1.3e-160, PFam score of 516.6
MGSACIKVTKYFLFLFNLIFFILGAVILGFGVWILADKSSFISVLQTSSSSLRMGAYVFIGVGAVTMLMGFLGCIGAVNEVRCLLGLYFAFLLLILIAQVTAGALFYFNMGKLKQEMGGIVTELIRDYNSSREDSLQDAWDYVQAQVKCCGWVSFYNWTDNAELMNRPEVTYPCSCEVKGEEDNSLSVRKGFCEAPGNRTQSGNHPEDWPVYQEGCMEKVQAWLQENLGIILGVGVGVAIIELLGMVLSICLCRHVHSEDYSKVPKY

SEQ ID NO: 12890 - protein, 15 aa, Homo sapiens
MIHLPRPPKVLGLQA

SEQ ID NO: 12891 - protein, 161 aa, Homo sapiens
  misc_feature (1)...(161): Xaa = X or * as defined in Table 2
APALPQPTGLAASSHMVQVPLWICLKLSHSKSRNSPQLFFXVFQFLRRSLSSVPQAGVQXHDLSSLQPPPPGFTPFSCLSLPSSWDYRCPPPRPAKFFLYFXXRRGFTMLARMVSISXPRDPPASASQSAGITGVSHRARPPPPQFFIQLPLYNIHTLEGR

SEQ ID NO: 12892 - protein, 172 aa, Homo sapiens
  misc_feature (1)...(172): Xaa = X or * as defined in Table 2
WHPQSDVQAEVQWRDLGLLQSSPPGFTLFSCLSLLSSWDYRRPPPRPGXFLYFXXRRGFTVLARMVSISXLHDPPALASQSAGITGVSHRTRPGADLXPRVQKPRASLGGXNHMCNMKSLPTGQTRLNKGRRLGHFPDHWRWKETPGLXCFHGNFCGALKAGRAHLDGQGRR

SEQ ID NO: 12893 - protein, 221 aa, Homo sapiens
  DOMAIN (1)..(44): CRAL/TRIO domain identified by PFam, accession name CRAL_TRIO, E-value=3e-06, PFam score of 24.0
MISPFINENTRRKFLIYSGSNYQGPGGLVDYLDREVIPDFLGGESVLGLNYLRSFRLAGWRAVLVMLTFYLQVWGDTDRGQASPFSSTVKLSGLGLSPFFDPCSFSPPTGRCPGCDNKLYGQLANVKKVRTGYKYIGMGRKARNNVEESQEITTAWLALTLALAFLLLISTAANLSLLLSRAERNRRLHGDYAYHPLQEMNGEPLAAEKEQPGGAHNPFKD

SEQ ID NO: 12894 - protein, 546 aa, Homo sapiens
  DOMAIN (9)..(64): ELEMENT INSERTION TRANSPOSABLE SEQUENCE TRANSPOSASE FOR domain identified by eMATRIX, accession number PD02662D, p-value= 3.973e-10, raw score of 21.71
SAKEPWILATNLPVEIRTPKQLVNIYSKRMQIEETFRDLKSPAYGLGLRHSRTSSSERFDIMLLIALMLQLTCWLAGVHAQKQGWDKHFQANTVRNRNILPLLAFHLGPFRSLADIPRNRVYEDFDPHCRPMIITSLSNLPWHSINSCQQPLGVAITCTCSLNVHDSHLRYAASTCTCVLPMSGAQPLSTRAVAQLYSPDADAKRAAVPARSTDKPENHAHPHSHFTHQYYKTQYHHLKKTFPWWLGDVKLTIPLTLGMVAAALTDLDDRLAGRLRNLIITLFCFFIASASVELLFPWPWLFAIGLTLSTSGFILLGALVQRYATIAFGALLIAIYTMLGTSLYEHWYQQPMYLLAGAVWYNVLTLIGHLLFPVRPLQDNLARCYEQLARYLELKSRMFDPDIEDQSQAPLYDLALANGLLMATLNQTKLSLLTRLRGDRGQRGTRRTLHYYFVAQDIHERASSSHIQYQTLREHFRHSDVLFRFQRLMSMQGQACQQLSRCILLRQPYQHDSAFLSALLRILMLRWSGCAITAHPPIYSKHWDNA

SEQ ID NO: 12895 - protein, 518 aa, Homo sapiens
  DOMAIN (334)..(377): Integrins beta chain cysteine-rich domain proteins domain identified by eMATRIX, accession number BL00243I, p-value=2.714e- 11, raw score of 31.77
  misc_feature (1)...(518): Xaa = X or * as defined in Table 2
MATSTGRWLLLRLALFGFLWEASGGLDSGASRDDDLLLPYPRARARLPRDCTRVRAGNREHESWPPPPATPGAGGLAVRTFVSHFRDRAVAGHLTRAVEPLRTFSVLEPGGPGGCAARRRATVEETARAADCRVAQNGGFFRMNSGECLGNVVSDERRVSSSGGLQNAQFGIRRDGTLVTGYLSEEEVLDTENPFVQLLSGVVWLIRNGSIYINESQATECDETQETGSFSKFVNVISARTAIGHDRKGQLVLFHADGHTEQRGINLWEMAEFLLKQDVVNAINLDGGGSATFVLNGTLASYPSDHCQDNMWRCPRQVSTVVCVHEPRCQPPDCHGHGTCVDGHCQCTGHFWRGPGCDELDCGPSXLAAQHGLCNGSTGLSAVDAGWTGSNCSEECPLGWHGPGCQRPCKCEHHCPCDPKTGNCSVSRVKQCLQPPEATLRAGELSFFTRTAWLALTLALAFLLLISIAANLSLLLSRAERNRRLHGDYAYHPLQEMNGEPLAAEKEQPGGAHNPFKD

SEQ ID NO: 12896 - protein, 297 aa, Homo sapiens
  misc_feature (1)...(297): Xaa = X or * as defined in Table 2
ALHPPAQGELFCDYFKDPSWSEGPQSPPLTRLAPHPQTQCTELSGGRRGSAVLEECVPTPASAHLAASPAEAGTAGVWRXRHHFHSTGLLGPRXLSMSLLMSXCKAGRCPPGEDCPRPLPGCSLSPLERKLCFSSAXGPASFLGGLTAKASGCSLSLRPHSHIQGHGLWEKLXVPARRAGGGVCFKSAPHLQSLXXKPSSKASKREGXQXTLPSATIGELPFKXHAPKHLCNAQGFLCKIHXHHKQTANAIKAXGGPGSLEGTLRRPGSPPSSLGVGSGKTEVNSQNCRHLGREGVS

SEQ ID NO: 12897 - protein, 148 aa, Homo sapiens
  misc_feature (1)...(148): Xaa = X or * as defined in Table 2
FFFFFLRQSLNSVIXAGVQQPLPPEFKRLSCLSLPSSWDYRCAPAHSANFCIFSKDMGFTMLTRLVSNSWQQCELPTLASQSGITGVSHHTQPIYHFIFVETEFHHVAQAGVKPPSLKXSSRLSLPKQWNYSHEPLYPALFNETFFFK

SEQ ID NO: 12898 - protein, 2246 aa, Homo sapiens
  DOMAIN (434)..(449): POLLEN ALLERGEN POA PI SIGNATURE domain identified by eMATRIX, accession number PR00833H, p-value=3.077e-09, raw score of 2.30
  DOMAIN (4)..(95): Gag P30 core shell protein domain identified by PFam, accession name Gag_p30, E-value=1.4e-27, PFam score of 100.2
MRGAQKATNVNKLSEVIQGKEESPAQFYQRLCEVYRMYTPCDPDSPENQHMIHMALVRQSPEDMRRKLQKQAGLAGMNPSQLLEIASQVFVNRDAVSRKENGKENGGQARRYADLFSPVEPDCVEVLDSIHSSRPDLRDQPWPSGDWELYVDGSSFFNPQGERGAGYAVITLDTVVEATSLPQATSGQKAELIAFIGALELSEGETVNIYTDSRHGTEEGQQILKQPVSERLDFVCSFLQRRNSFYMGTCQDEPEQLDDWNRIAELQQRNRVCPPHLKTCYPLESRPSLSLGTITDEEMKTGDPQETLRRASMQPIQIAEGTGITTRQQRKRVSLEPHQGPGTPESKKATSCFPRPMTPRDRHEGRKQSTTEAQKKAAPASTKQADRRQSMAFSILNTPKKLGNSLLRRGASKKALSKASPNTRSGTRRSPRIATTTASAATAAAIGATPRAKGKLGQDDVTLDNLFRVHEHTGEVGAVQGRGQLLQHQGLAQLRTCAPTFPAGAEGKERYGFQEVHPVFYVVVIAENRKHPSSPECLVSAQKVLEGSELELAKMTMLLLYHSTMSSKSPRDWEQFEYKIQAELAVILKFVLDHEDGLNLNEDLENFLQKAPVPSTCSSTFPEELSPPSHQAKREIRFLELQKVASSSSGNNFLSGSPASPMGDILQTPQFQMRRLKKQLADERSNRDELELELAENRKLLTEKDAQIAMMQQRIDRLALLNEKQAASPLEPKELEELRDKNESLTMRLHETLKQCQDLKTEKSQMDRKINQLSEENGDLSFKLREFASHLQQLQDALNELTEEHSKATQEWLEKQAQLEKELSAALQDKARAKGDLGNKMMGPMFADVYEGLCGNLKCLEEKNEILQGKLSQLEEHLSQLQDNPPQEKGEVLGDVLQLETLKQEAATLAANNTQLQARVEMLETERGQQEAKLLAERGHFEEEKQQLSSLITDLQSSISNLSQAKEELEQASQAHGARLTAQVASLTSELTTLNATIQQQDQELAGLKQQAKEKQAQLAQTLQQQEQASQRLRHQVEQLSSSLKQKEQQLKEVAEKQEATRQDHAQQLATAAEEREASLRERDAALKQLEALEKEKAAKLEILQQQLQVANEARDSAQTSVTQAQREKAELSRKVEELQACVETARQEQHEAQAQVAELELQLRSEQQKATEKERVAQEKDQLQEQLQALKESLKVTKGSLEEEKRRAADALEEQQRCISELKAETRSLVEQHKRERKELEEERAGRKGLEARLQQLGEAHQAETEVLRRELAEAMAAQHTAESECEQLVKEVAAWRERYEDSQQEEAQYGAMFQEQLMTLKEECEKARQELQEAKEKVAGIESHSELQISRQQNELAELHANLARALQQVQEKEVRAQKLADDLSTLQEKMAATSKEVARLETLVRKAGEQQETASRELVKEPARAGDRQPEWLEEQQGRQFCSTQAALQAMEREAEQMGNELERLRAALMESQGQQQEERGQQEREVARLTQERGRAQADLALEKAARAELEMRLQNALNEQRVEFATLQEALAHALTEKEGKDQELAKLRGLEAAQIKELEELRQTVKQLKEQLAKKEKEHASGSGAQSEAAGRTEPTGPKLEALRAEVSKLEQQCQKQQEQADSLERSLEAERASRAERDSALETLQGQLEEKAQELGHSQSALASAQRELAAFRTKVQDHSKAEDEWKAQVARGRQEAERKNSLISSLEEEVSILNRQVLEKEGESKELKRLVMAESEKSQKLEERLRLLQAETASNSARAAERSSALREELEHTSTQALVSELLPAKHLCQQLQAEQAAAEKRHREELEQSKQAAGGLRAELLRAQRELGELIPLRQKVAEQERTAQQLRAEKASYAEQLSMLKKAHGLLAEENRGLGERANLGRQFLEVELDQAREKYVQELAAVRADAETRLAEVQREAQSTARELEVMTAKYEGAKVKVLEERQRFQEERQKLTAQVEQLEVFQREQTKQVEELSKKLADSDQASKVQQQKLKVGQLGEWVWPLDKGGKLFSKLWGRGGLVYKWFLLIYKISYATGIVGYMAVMFTLFGLNLLFKIKPEDAMDFGISLLFYGLYYGVLERDFAEMCADYMASTIGFYSESGMPTKHLSDSVCAVCGQQIFVDVSEEGIIENTGAQLPRVLHPWLVHRGKEANVSLLQREGRPQEDVQQSVSFIGVVVGSGLWEESTGQCDLHLGPPGALTSAPNQNMSNHEQQKDYEGDDEDKEDDDRHHGIMNPY

SEQ ID NO: 12899 - protein, 121 aa, Homo sapiens
  DOMAIN (12)..(67): Orbivirus outer capsid protein VP5 domain identified by eMATRIX, accession number PF00901D, p-value=8.974e-09, raw score of 19.87
  misc_feature (1)...(121): Xaa = X or * as defined in Table 2
MRLHETLKQCQDLKTEKSQMDRKINQLSEENGDLSFKLREFASHLQQLQDALNELTEEHSKATQEWLEKQAQLEKELSAALQDKKCLEEKNEILQGKLSQLEEHLSQLQDNPPQEKGEALX

SEQ ID NO: 12900 - protein, 142 aa, Homo sapiens
  misc_feature (1)...(142): Xaa = X or * as defined in Table 2
GLLSTRPISCRHTLXGPLQSSWEYMDVPWDLRASEGNGKLLYSARDCTLQQIHSVFQKLDVEEPDSANSSFYSTRSAPASQASLRATSSTQSLARLGSPDYGNSALLSLPGYRPTTRSSARRSQAGVSSGAPPGEGTTGTYY

SEQ ID NO: 12901 - protein, 66 aa, Homo sapiens
  misc_feature (1)...(66): Xaa = X or * as defined in Table 2
MPRSSRTKSCRSSCGAWSSCMKENKELRAEAERLGHELQQAGLKTKEAEQTCRHLTAQVRSLGGTX

SEQ ID NO: 12902 - protein, 137 aa, Homo sapiens
REGLYLSRFPFHSKLPRTQPDGTSVPGEPASPISQRLPPKVESLESLYFTPIPARSQAPLESSLDSLGDVFLDSGRKTRSARRRTTQIINITMTKVRLLGQGLQGSNSHFLSRASLHWALSQEQGGMSSQSMLQWES

SEQ ID NO: 12903 - protein, 135 aa, Homo sapiens
QELQEQLRSLEQLQKENKELRAEAERLGHELQQAGLKTKEAEQTCRHLTAQVRSLEAQVAHADQQLRDLGKFQVATDALKSREPQAKPQLDLSIDSLDLSCEEGTPLSITRSGGSLPPYVCLWSACCLSGCILVR

SEQ ID NO: 12904 - protein, 1758 aa, Homo sapiens
  DOMAIN (1686)..(1701): POLLEN ALLERGEN POA PI SIGNATURE domain identified by eMATRIX, accession number PR00833H, p-value=3.077e-09, raw score of 2.30
  misc_feature (1)...(1758): Xaa = X or * as defined in Table 2
IWCLFPLSVHMGLIYSQKCLEEKNEILQGKLSQLEEHLSQLQDNPPQEKGEVLGDVLQLETLKQEAATLAANNTQLQARVEMLETERGQQEAKLLAERGHFEEEKQQLSSLITDLQSSISNLSQAKEELEQASQAHGARLTAQVASLTSELTTLNATIQQQDQELAGLKQQAKEKQAQLAQTLQQQEQASQRLRHQVEQLSSSLKQKEQQLKEVAEKQEATRQDHAQQLATAAEEREASLRERDAALKQLEALEKEKAAKLEILQQQLQVANEARDSAQTSVTQAQREKAELSRKVEELQACVETARQEQHEAQAQVAELELQLRSEQQKATEKERVAQEKDQLQEQLQALKESLKVTKGSLEEEKRRAADALEEQQRCISELKAETRSLVEQHKRERKELEEERAGRKGLEARLQQLGEAHQAETEVLRRELAEAMAAQHTAESECEQLVKEVAAWRERYEDSQQEEAQYGAMFQEQLMTLKEECEKARQELQEAKEKVAGIESHSELQISRQQNELAELHANLARALQQVQEKEVRAQKLADDLSTLQEKMAATSKEVARLETLVRKAGEQQETASRELVKEPARAGDRQPEWLEEQQGRQFCSTQAALQAMEREAEQMGNELERLRAALMESQGQQQEERGQQEREVARLTQERGRAQADLALEKAARAELEMRLQNALNEQRVEFATLQEALAHALTEKEGKDQELAKLRGLEAAQIKELEELRQTVKQLKEQLAKKEKEHASGSGAQSEAAGRTEPTGPKLEALRAEVSKLEQQCQKQQEQADSLERSLEAERASRAERDSALETLQGQLEEKAQELGHSQSALASAQRELAAFRTKVQDHSKAEDEWKAQVARGRQEAERKNSLISSLEEEVSILNRQVLEKEGESKELKRLVMAESEKSQKLEERLRLLQAETASNSARAAERSSALREELEHTSTQALVSELLSAKHLCQQLQAEQAAAEKRHREELEHSKQAAGGLRAELLRAQRELGELIPLRQKVAEQERTAQQLRAEKASYAEQLSMLKKAHGLLAEENRWLGERANLGRQFLEVELDQAREKYVQELAAVRADADTRLAEVQREAQSTARELEVMTAKYEGAKVKVLEERQRFQEERQKLTAQVEQLEVFQREQTKQVEELSKKLADSDQASKVQXQKLKAVQAQGGESQQEAQRLQAQLNELQAQLSQKEQAAEHYKLQMEKAKTHYDAKKQQNQXLQEQLRSLEQLQKENKELRAEAERLGHELQQAGLKTKEAEQTCRHLYLPRLRSLEAQVAHARPSSFRDLGKFQVATDALKSREPQAKPQLDLSIDSLDLSCEEGTPLSITSKLPRTQPDGTSVPGEPASPISQRLPPKVESLESLYFTPIPARSQAPLESSLDSLGDVFLDSGRKTRSARRRTTQIINITMTKKLDVEEPDSAPNLSFYSTRSAPASQASLRATSSTXSLTRLGSPDYGNSALLSLPGYRPTTRSSARRSQAGVSSGAPPGRNSFYMGTCQDEPEQLDDWNRIAELQQRNSELWPPNLKNWLSPWESRPSLSLGTITDEEMKTGDPQETLRRASMQPIQIAEGTGITTRQQRKTGLPXEPHQGPGNPXVLKKATSCFPRPMTPRDRLEGAQTEHLLEAQKKAAPAFLLKQADRRQSMAFSILQPHPRSLGNSLLRRGASKKALSKASPNTRSGTRRSPRIATTTASAATAAAIGATPRAKGTANHLKGQVPVSGPTLCPRCLPSPGPPPTVPLSAFSQLPRPNSSLTS

SEQ ID NO: 12905 - protein, 1719 aa, Homo sapiens
  DOMAIN (291)..(305): Thioesterase domain proteins domain identified by eMATRIX, accession number PF00975B, p-value=9.333e-13, raw score of 10.82
  DOMAIN (230)..(589): Thioesterase domain identified by PFam, accession name Thioesterase, E-value=3.8e-38, PFam score of 140.2
SARSASFRPGRPAARRPKCSHPLVPDGVPECCKCVHPASTNFPRRTSTAARHSHHNDGSTSTMGRTWQIVGYLVSQSGLPLDTSALQAQLRETLPPHMVPEVLLQLPQLPLNANGKLDRKALPLPELKAQAPGRAPKAGSETIIAAAFSSLLGCDVQDADADFFALGGHSLLAMKLAAQLSRQVARQVTPGQVMVASTVAKLATIIDAEEDSTRRMGFETILPLREGNGPTLFCFHPASGFAWQFSVLSRYLDPQWSIIGIQSPRPNGPMQTAANLDEVCEAHLATLLEQQPHGPYYLLGYSLGGTLAQGIAARLRARGEQVAFLGLLDTWPPETQNWQEKEANGLDPEVLAEINREREAFLAAQQGSTSTELFTTIEGNYADLSSARSWASTSFPLNHDFGTLAGVCIGLSHNRASDAETVVLENWRQVHEQCLALHSQQQTLQQQDVLAAQSLQKAQAQFDTALQASVFDDQQAFLAALMDEQTLTQLEQLKQNLENQRRQAQTLVTQTAETLAQHQQHRPDDGLALTVTVEQIQQELAQTHQKLRENTTSQGEIRQQLKQDADNRQQQQTLMQQIAQMTQQVEDWGYLNSLIGSKEGDKFRKFAQGLTLDNLVHLANQQLTRLHGRYLLQRKASEALEVEVVDTWQADANENQTHAQHEQAPTTGTTHGTTMTHNTEHTERLSPGSGHRRYRHRSTDRNRQCTGTGNDTHFTRFVNVTRLDTDFAFTRSDNAWAVRADHTNACFIQLHFHGQHIQRRDAFSDGDNQFDACVDGFQNGVFAERCWYSNRSGSASGSNGFTHGVEHRQAEAAVSQFLRAEFGVVTFQTYHDRYVNTHFCYRADDTVSDQVATNDTAEDVNQNGFHFVVREDDFERFGYTFFGCAAANVKEVSRFAAVQFNDVHRTHRQTCAVNHTTDVTVQRNFPLCSLCFTRIFLRLVTHFAQIRLAEQCVAVSAQFAVEANQIALFGDDQRKRIKRNFMDKVRSFFRHFFDFHAAFGGGNKDHTTGTTVNNGTEIQLLSDIGRCFNQNLVNRLAIGICLIRYQTLAQPVFCKSTDVFFAVYNFHTASGLFQSSSANDVRYTLTATEMVIAPAGFMDEAISENVLAGNIMSRRALYSYGLLLPHNAQGNVGNGLGVTLATGDPSIIAPTKTIVRTGEKMIIDGLEFDFLMTPGSEAPAEMHFYIPALKALCTAENATHTLHNFYTLRGAKTRDTSKWTEYLNETLDMWGNDAEVLFMPHTWPVWGNKHINDYIGKYRDTIKYIHDQTLHLANQVYTMNEIGDMIKLPPALANNWASRGYYGSVSHNARAVYNFYLGYYDVYPANLHPYGQVEMGKRYVQALGGSARVINLAQEANKQGDYRWSAELLKQVIAANPGDQVAKNLQANNFEQLGYQAESATWRGFYLTGAKELREGVHKFSHGTTGSPDTIRGMSVEMLFDFMDRQACHQYNRTRVVDQLIEFLQDQHVNAHLAEIVRHHQPNRAGTSDRHLERYEMSINMQNNEQTEYKTVRGLTRGLMLLNMLNKLDGGASVGLLAELSGLHRTTVRRLLETLQEEGYVRRSPSDDSFRLTIKVRQLSEGFRDEQWISALAAPLLGDLLREVVWPTDVSTLDVDAMVVRETTHRFSRLSFHRAMVGRRLPLLKTASGLTWLAFCPEQDRKELIEMLASRPGDDYQLAREPLKLEAILARARKEGYGQNYRGWDPGGEDRLYRRTAAQ

SEQ ID NO: 12906 - protein, 99 aa, Homo sapiens
  misc_feature (1)...(99): Xaa = X or * as defined in Table 2
NLLRTMIFWFGFEDRVWLCCPVLTATSVLTATSTFPGFKQFSCLSLLSSWDYRCIPPHPGNLWYFXXRQGFTMLARLDSNSGPQAIHPPQPPKVLGLHV

SEQ ID NO: 12907 - protein, 203 aa, Homo sapiens
  DOMAIN (75)..(110): Prion protein domain identified by eMATRIX, accession number BL00291A, p-value=8.590e-10, raw score of 4.49
  misc_feature (1)...(203): Xaa = X or * as defined in Table 2
GLRALRRGQGLPGLXCCSRPQPSPRAQGHPSMGGPMQRVTPPRGMASVGPQSYGGGMRPPPNSLAGPGLPAMNMGPGVRGPWASPSGNSIPYSSSSPGSYTGPPGGGGPPGTPIMPSPGDSTNSSENMYTIMNPIGQGAGRANFPLGPGPEGPMAAMSAMEPHHVNGSLGSGDMDGLPKSSPGAVAGLSNAPGTPRDDGEMAA

SEQ ID NO: 12908 - protein, 113 aa, Homo sapiens
MYAKGGKGSAVPSDSQAREKLALYVYEYLLHIGAQKSAQTFLSEIRWEKNIMPSPGDSTNSSENMYTIMNPIGQGAGRANFPLGPGPEGPMAAMSAMEPHHVNGSLGSGDMDG

SEQ ID NO: 12909 - protein, 157 aa, Homo sapiens
  DOMAIN (57)..(92): Prion protein domain identified by eMATRIX, accession number BL00291A, p-value=8.590e-10, raw score of 4.49
  misc_feature (1)...(157): Xaa = X or * as defined in Table 2
MEPSPRAQGHPSMGGXMQRVTPPRGMASVGPQSYGGGMRPPPNSLAGPGLPAMNMGPGVRGPWASPSGNSIPYSSSSPGSYTGPPGGGGPPGTPIMPSPGDSTNSSENMYTIMNPIGQGAGRANFPLGPGPEGPMAAMSAMEPHHVNGSLGSGDMDG

SEQ ID NO: 12910 - protein, 21 aa, Homo sapiens
  misc_feature (1)...(21): Xaa = X or * as defined in Table 2
XLARDDHERVMGRQPRASLRA

SEQ ID NO: 12911 - protein, 580 aa, Homo sapiens
MYAKGGKGSAVPSDSQARENLSAFQAATELTSLDRLALYVYEYLLHIGAQKSAQTFLSEIRWEKNITLGEPPGFLHSWWWYGLGCCGVFWDLYCAAPDRREACEHSGEAKAFQDYETPERPAHRHGNAGRAGSSSGMIDVGGSSDPQILRPTTPVCSLTNASSLSHGAGHLQRGGGTPQSAAAAPSPVMGSMAPGDTMAAGSMAAGFFQGPPGSQPSPHNPNAPMMGPHGQPFMSPRFPGGPRPTLRDGSQPPAGPPWVPSPSSPGAMEPSPRAQGHPEHGRPNARGVTPPRGMGPAWGPRAYGGGMRPPPNSLTRPRACLPMNMGPRKFVGPWAQPPVEYSIPYSSSSPGSYTGPPGGGGPPGTPIMPSPGDSTNSSENMYTIMNPIGQGADRANFPLGPGPEGPMAAYGGMEPHHVNGSLGSGDMDGLPREFPQAPVAGLSNAPGTPRDDGEMAAAGTFHAPSSQSENYSPGMTMSRVNWAAAPGALCGPRLLPRRPCLRAKGLKVTPSGTLDSLANQGLPMLGGPTRKTLTILLKTQGPRETFFSVWTLPAICILVPERKALWGGPSSPGRQGGGAH

SEQ ID NO: 12912 - protein, 48 aa, Homo sapiens
NGPSRTQQPSLTDVLYCPEAIVSLVGVLRRLAACQEHKRAPEVYVAFT

SEQ ID NO: 12913 - protein, 67 aa, Homo sapiens
RRVLHTHTGCFTVFCKISRSSSESDESLNFASKLWQERRGFQHGDPSRLPLDSREPRGPLRSPAATK

SEQ ID NO: 12914 - protein, 1052 aa, Homo sapiens
  DOMAIN (15)..(326): Type I phosphodiesterase / nucleotide py domain identified by PFam, accession name Phosphodiest, E-value=0.00033, PFam score of -98.3
LLLWDWVICQLSKELAENRCNQSEPRSRSACVEIAAFTFNMAKMFSFNDSNAARIHQDTQELMCFGRWCWKDGIPGSLCIPCSQPMSISTVQQGKKAASSHYSRGGAKYEGEAVKRSLVESYTHPNSNETERRENIDTVMNCFSTEDFDFVTLYYREPDNVGHRFGPEAEKRKLMIQQIGRTIVYLVGATEKHSLQSTSAPWGDHREEETQRQQDPLTNYIKFRVWVKFDIAGYGGFGLPLPKLGQEEALYQALKNAHPHLQVYKKEEFPEHFHLAKHDRVLPIVIFQRIIMCFNKGSHGFDNVLMDMNIIFRAFGPDFKRNRLAEPFNSIHIYPFVSPGSHPQTHNGSLAVTQEMLMNSYDQQPGRELIKTAKAKQCPGPVLKPTFLNHPDPSQSRLGFRPVSRQRCGPAPVLVPEENAGTELLLQSFERRFLAARALRSFPWQTVKHPVCVKHRLSVKYARCFLSELTKKHEAVHTELLDKLYEDLAETLMAKESTQGHPSYLLNSVVSGMFDEWNPVWPEMSVFHATTVLELGSGASLTGLAICKMCRLQAYIFSDCHSQVLEKLRGNVLLNGLSLEADISANLDSPRVTVAQLDWDVATVHQLSAIQPDVVIAAGNAQPRALCAGDVLYCPESIVSLVAVLRRLAAYREHQRAPQVYVALIVRNPETCQLFTTELSFAPDHPEHSPSWQPCAQMHAQQPLPAHRDVGPMPVHVGQRVNYRANKQASTRRHTGFHDKHFLCANKNVCIKYDVPPNVDTLGSSQSQARCSCHICGHTRFLTKPSPLQLPHRWTHSVPHKAKPAAAATSLDTLGSSQSQAHCSCHIPGHTRFLTKPSPLQLPHRWTHSVLHKAKPAAAATSVDTLDSSQSQAHCSCHIPGHTRFFTKPSPLQLPHPWTHSVLHKAKPAAAATSLDTLGSSQSQARCSCHIPGHTRFLTKPSPLQLPHRWTHSVLHKAKPAAAVTSVDTLGSSQSQARCSCHIGGHTRFLTKPSPLQLPHPWTHSVLHKAKPAAAATSLDTLGSSQSQARCSCHIPGLMVQQVLFSRQESKC

SEQ ID NO: 12915 - protein, 490 aa, Homo sapiens
MAPEENAGTKLLLQSFERRFLAARTLRSFPWQVGGGASGEACGACGSPGADGMGLPAETPGAPATEGSHSALPTHSIACFNVPVNAPLRFLSLPSTRSLEAKLRDSSDSELLRDILQKHEAVHTELLDELYEALAETLMAKESTQGHWSYLLPRYPSCTDKVKTPRKARSHSPSTAIISHGTTGLVTWDAARYLAEWAIKNLAAFTNRTVLELGSGAGLTGLSICKMWPPPDIHLHDCHSRVLEQLRGNVLLNGLSLEADITANLDSPRVTVAQLDWDVATVHQLSAFQPDVVITADVLYCPEAIVSLVGVLRRLAACWEHQWAPEVYMAFTVRNPETCQLFTTELAPSTCEGVLSLSHLTDKNTRTHRGQETPELPQIAARPPGFSAFTVHPSPPLPPDFAPAPPEHSPSWQPCAKMHPQQPLPAHRDMDDPVPVHVGQPVNYRANKQASTRRHTGFHDRVPHNLAQEAGQAWGSGLSSQHFRRLRQED

SEQ ID NO: 12916 - protein, 989 aa, Homo sapiens
  DOMAIN (516)..(552): PHOSPHOPANTETHEINE BIOSYNTHESIS domain identified by eMATRIX, accession number PD00284B, p-value=4.000e-26, raw score of 28.46
  DOMAIN (162)..(567): AMP-binding enzyme domain identified by PFam, accession name AMP-binding, E-value=5.2e-198, PFam score of 671.2
MKQEVILVLDCGATNVRAIAVNRQGKIVARASTPNASDIAMENNNQAVFPGKLQIPRRQTMTEIQRLLTETIESLNTREKRDNKPRFSISFIRKHPGLFIDNKMNTSIPIKIDNLPGEYAQLAQLNATQVEIPETTLSALVAEQAAKTPDAPALADARYLFSYREMREQVVALANLLRERGVKPGDSVAVALPRSVFLTLALHAIVEAGAAWLPLDTGYPDDRLKMMLEDARPSLLITTDDQLPRFSDVPNLTSLCYNAPLTPQGSAPLQLSQPHHTAYIIFTSGSTGRPKGVMVGQTAIVNRLLWMQNHYPLTGEDVVAQKTPCSFDVSVWEFFCPFIAGAKLVMAEPEAHRDPLAMQQFFAEYGVTTTHFVPSMLAAFVASLTPQTARQSCATLKQVFCSGEALPADLCREWQQLTGAPLHNLYGPTEAAVDVSWYPAFGEELAQVRGSSVPIGYPVWNTGLRILDAMMHPVPPGVAGDLYLTGIQLAQGYLGRPDLTASRFIADPFAPGERMYRTGDVARWLDNGAVEYLGRSDDQLKIRGQRIELGEIDRVMQALPDVEQAVTHACVINQAAATGGDARQLVGYLVSQSGLPLDTSALQAQLRETLPPHMVPVVLLQLPQLPLSANGKLDRKALPLPELKAQAPGRAPKAGSETIIAAAFSSLLGCDVQDADADFFALGGHSLLAMKLAAQLSRQVARQVTPGQVMVASTVAQLATIIDAEEDSTRRMGFETILPLREGNGPTLFCFHPASGFAWQFSVLSRYLDPQWSIIGIQSPRPNGPMQTAANLDEVCEAHLATLLEQQPHGPYYLLGYSLGGTWRRVAFLGLLDTWPPETQNWQEKEANGLDPEVLAEINREREAFLAAQQGSTSTELFTTIESECNVYSDLDLYLGVQRINWTEMFNPGATFAVTFSGLNDTIRNSQYGAMKVKDAIVDAFTRKNLPRPNVDRDAPDIRVNVWLHKETASIALDLSGDGLHLRGIAIVL

SEQ ID NO: 12917 - protein, 137 aa, Homo sapiens
PWGDHREEETQRQQDPLTNYIKFRVWVKFDIAGYGGFGLPLPKLGQEEALYQALKNAHPHLQVYKKEEFPEHFHLAKHDRVLPIVIFQRIIMCFNKGSHGFDNVLMDMNIIFRAFGPDFKRNRLAEPFNSIHIYPFV

SEQ ID NO: 12918 - protein, 76 aa, Homo sapiens
QARLPPGLPATLRPRPRLGARGERGDRTLAAEFRAPLPGGARTAFLPLADCEASCVCEAPAVSQVCPVLSLRTHQK

SEQ ID NO: 12919 - protein, 474 aa, Homo sapiens
  DOMAIN (257)..(276): RHO PROTEIN GDP DISSOCIATION INHIBITOR SIGNATURE domain identified by eMATRIX, accession number PR00492B, p-value=8.141e- 09, raw score of 9.77
SWNTPYNHWATKQLSSHYSRGGAKYEGEAVKQSLVESYTHPNSNETERSANIDTVMNWFTKEDFDFVTLCYREPDNVGHRFRPEAENRKLMIQQIDRTIRPWDDHREEETQCQQDPLSNYIKFMDLVKFDIVGYGGFGMPLPKLGQEEALYQALKNAYPHLHIYKKEGFPEHFHLAKHDRVLPIVMYANFGYSINGISLLYFYTHLCDKYFNVHFFHEPLSLWRAQTTPSLSHRYISLVRHMDATNLDASEAQLPGSPYPDSAPGPANLDSTQDLPQRRLSWPYPRPRPPNAHPGPALQPAPRTLLLTLPPGPAPSLPPRTALGPPPLQSRPGFRPVSRQRCGPAHFMAPEENAGTELLLQSFERRFLAARTLRSFPWQGGGGRAERPAGLAGVQGQTGWVSVLKPPALLPREFLGSPRSGPRDPVPVPGAWPKSLAPLLPRELAAEDEGVSTALGGQTRARCGVQFTIIFTTF

SEQ ID NO: 12920 - protein, 70 aa, Homo sapiens
  misc_feature (1)...(70): Xaa = X or * as defined in Table 2
DFSLSRPHGAXKQNXETHQILSCCGDILHKTVKHSCVCEAPAVRQICPVLSLRTHQKARGCPHRAFGRAV

SEQ ID NO: 12921 - protein, 148 aa, Homo sapiens
  misc_feature (1)...(148): Xaa = X or * as defined in Table 2
SHVALGQLGWLTRAVRSSWRWELCVSSTGSGLPAFSLKQPKSCRCWXEEVKTGSCVGISHWQTSTVFPQAVFHLPPVLLPRSLACLSCPRGCAQIRCQXTPPYPLFPIILTYSFGMLSSTVLIRHILETNKKEKSLLAAEGVRHLQVS

SEQ ID NO: 12922 - protein, 167 aa, Homo sapiens
  DOMAIN (106)..(124): Immunoglobulins and major histocompatibility complex proteins domain identified by eMATRIX, accession number BL00290B, p-value= 2.500e-09, raw score of 13.17
  DOMAIN (42)..(111): Immunoglobulin domain identified by PFam, accession name ig, E-value=0.041, PFam score of 11.8
ERGTYICQITTSLYRAQQIIQLNIQASPKVRLSLANEALLPTLICDIAGYYPLDVVVMWTREELGGSPSPSLWSSFSKPQAKALAGTYSISSSLTAEPGRLQVPLYTCQVTHISLEEPLGASTPGCPTRAENSLGSHLCQQSLPSCTDVPWGFRDGQAPNRTWAASG

SEQ ID NO: 12923 - protein, 263 aa, Homo sapiens
  misc_feature (1)...(263): Xaa = X or * as defined in Table 2
VEELSKKLADSDQASKVQQQKLKVGQLGEWVWPLDKGGKLFSKLWGRGGLVYKWFLLIYKISYATGIVGYMAVMFTLFGLNLLFKIKPEDAMDFGISLLFYGLYYGVLERDFAEMCADYMASTIGFYSESGMPTKHLSDSVCAVCGQQIFVDVSEEEDHXEHRCSCFHEFCIRGWCIVGKKQTCPYCKEKVDLKRMFSNPYPLLGSLLGVGCGKKVLASVTCIWVLLGPSLLPPTRTCQTMNNKKIMKVMMRIKRMMTDTMAS

SEQ ID NO: 12924 - protein, 334 aa, Homo sapiens
FRGRAVKMAAVVEVEVVGGAAGERELDEVDMSDLSPEEQWRVEHARMHAKHRGHEAMHAEMVLILIATLVVAQLLLVQWKQRHPRSYNMVTLFQMWVVPLYFTVKLHWWRFLVIWILFSAVTAFVTFRATRKPLVQTTPRLVYKWFLLIYKISYATGIVGYMAVMFTLFGLNLLFKIKPEDAMDFGISLLFYGLYYGVLERDFAEMCADYMASTIGFYSESGMPTKHLSDSVCAVCGQQIFVDVSEEGDHETTYRLSCNHVSHEFCIRGWCIVGKKQTCPYCKEKVDLKRMFSNPWERPHVMYGQLLDWLRYLVAWQPVIIGVVQGINYILGLE

SEQ ID NO: 12925 - protein, 47 aa, Homo sapiens
  misc_feature (1)...(47): Xaa = X or * as defined in Table 2
XTTSTSSTVTVTAPGPAATGSPVKKHRPLLPKETAPAVQRVVWNSSX

SEQ ID NO: 12926 - protein, 261 aa, Homo sapiens
  DOMAIN (40)..(74): MYND finger domain identified by PFam, accession name zf- MYND, E-value=1.3e-06, PFam score of 35.4
MAEMRQSLEQERDRLIAEVKKQLELEKQQAVDETKKKQWCANCKKEAIFYCCWNTSYCDYPCQQAHWPEHMKSCTQSATAPQQEADAEVNTETLNKSSQGSSSSTQSAPSETASASKEKETSAEKSKESGSDSIVHDGYFSSSLLCFGPPCISPCVTIPGRSGLLLCPLQGLRVSKRCDKQPAYAPTTTDHQPHPNYPAQKCKYEPVLRKLPGLLPDHSRSNKSSWSSSDEKRGSTRSDHNTSTSTKSLLPKESRLDTFWD

SEQ ID NO: 12927 - protein, 506 aa, Homo sapiens
  DOMAIN (227)..(263): PHOSPHOPANTETHEINE BIOSYNTHESIS domain identified by eMATRIX, accession number PD00284B, p-value=4.000e-26, raw score of 28.46
  DOMAIN (3)..(281): AMP-binding enzyme domain identified by PFam, accession name AMP-binding, E-value=1.3e-48, PFam score of 174.9
LDASFWIPPKATQGMTWIFTFPSSPSYNSSCYAGWLKGSAPLQLSQPHHTAYIIFTSGSTGRPKGVMVGQTAIVNRLLWMQNHYPLTGEDVVAQKTPCSFDVSQFFAEYGVTTTHFVPSMLAAFVASLTPQTARQSCATLKQVFCSGEALPADLCRVWQQLTGAPLHNLYGPTEAAVDVSWYPAFGEELAQVRGSSVPIGYPGYLGRPDLTASRFIADPFAPGERMYRTGDVARWLDNGAVEYLGRSDDQLKIRGQRIELGEIDRVMQALPDVEQAVTHACVINQAAATGGDARQLVGYLVSQSGLPLDTSALQAQLRETLPPHMVPVVLLQLPQLPLSAKAGCPAAQVPRVAQVRVCAVLEDLGDIRESEGERKQEADAVLGTQDTPRVTSQPNGLLLKIEPQENVKIEGQHQGLVWLCVAASPVLVRVTREKEEKKKEEGNNMRFTSLVLSVLVNIVRALEKKVLDIMFNNCRTGVQAITLSHRRALAIAIALARYIKSALYDG

SEQ ID NO: 12928 - protein, 542 aa, Homo sapiens
  DOMAIN (312)..(330): GLIADIN AND LMW GLUTENIN SUPERFAMILY SIGNATURE domain identified by eMATRIX, accession number PR00208A, p-value=9.868e- 10, raw score of 12.59
MDLKELSESVQQQSTPVPLISPKRQIRSRFQLNLDKTIESCKAQLGINEISEDVYTAVEHSDSEDSEKSDSSDSEYISDDEQKSKNEPEDTEDKEGCQMDKEPSAVKKKPKPTNPVEIKEELKSTSPASEKADPGAVKDKASPEPEKDFSEKAKPSPHPIKDKLKGKDETDSPTVHLGLDSDSESELVIDLGEDHSGREGRKNKKEPKEPSPKQDGKTPPSTTVGSHSPPETPVLTRSSAQTSAAGATATTSTSSTVTVTAPAPAATGSPVKKQRPLLPKETAPAVQRVVWNSSSKFQTSSQKWHMQKMQRQQQQQQQQNQQQQPQSSQGTRYQTRQAVKAVQQKEITQSPSTSTITLVTSTQSSPLVTSSGSMSTLVSSVNADLPIATASADVAADIAKYTSKMPFFRVYLLKHLESWGSVVIPGLEATAMHLASSVMQEQLGWGRRPACRWLWAPHWLTPWVLSPQLWEWREGALEVFGANVYIADTISHLLKPCPYGPVVGSRHCGNQEDSQMSPEEGAVPPLVKNLCSRELQNSLDYG

SEQ ID NO: 12929 - protein, 179 aa, Homo sapiens
  misc_feature (1)...(179): Xaa = X or * as defined in Table 2
CGWNTGYCDYPCQQAHWPEHIKSCTQSATALQQGADVEVNTEPLNKSSQGSSSSTQSAPSETASASKEKETSAEKSKESGSTLDLSGSRETPSSILLGSNQGSVSKRCDKATLLCPNHHRPPAAPQLPRPEVPFPELXNSRLSPPVFKKKGIRRVPIPNTSTSTKSLLPKESRLDTFWD

SEQ ID NO: 12930 - protein, 614 aa, Homo sapiens
  DOMAIN (462)..(496): MYND finger domain identified by PFam, accession name zf- MYND, E-value=1.3e-06, PFam score of 35.4
  misc_feature (1)...(614): Xaa = X or * as defined in Table 2
MEISEDVYTAVGHSDSEDSEKSDSSDSEFISDDEQKSKDEPEDTEDKEGCQMDKEPSAVKKKPKPTNPVEIKEELKSTSPASEKADPGAVKDKASPEPEKDFSGKAKPSPHPIKDKLKGKDETDSPTVHLGLDSDSENELVIDLGEDHSGREGRKNKKEPKEPSPKQDVVGKTPPSTTVGSHSPPETPVLTRSSAQTSAAGATATTSTSSTVTVTAPAPAATGSPVKKQRKLIPKETAPAVQRVRVELIKXSFKRPPKSGTCRRCSVSSSSSSSKTSSSSHQSSQGTRYQTRQAVKAVQQKEITQSPSTSTITLVTSTQSSPLVTSSGSMSTLVSSVNADLPIATASADVAADIAKYTSKLMDAIKGTMTEIYNDLSKNTTGSTIAEIRRLRIEIEKLQWLHQQELSEMKHNLELTMAEMRQSWEQERDRLIAEVKKQLELEKQQAVDETKKKQWCANCKKEAIFYCCWNTSYCDYPCQQAHWPEHMKSCTQSATAPQQEADAEVNTETLNKSSQGSSSSTQSAPSETASASKEKETSAEKSKESGSTLDLSGSRETPSSILLGSNQGSDHSRSNKSSWSSSDEKRGSTRSDHNTSTSTKSLLPKESRLDTFWD

SEQ ID NO: 12931 - protein, 566 aa, Homo sapiens
  DOMAIN (304)..(352): Intermediate filaments proteins domain identified by eMATRIX, accession number BL00226B, p-value=6.337e-09, raw score of 23.86
  DOMAIN (400)..(436): MYND finger domain identified by PFam, accession name zf- MYND, E-value=0.0097, PFam score of 10.4
RSEDSEKSDSSDSEYISDDEQKSKNEPEDTEDKEGCQMDKEPSAVKKKPKPTNPVEIKEELKSTSPASEKADPGAVKDKASPEPEKDFSEKAKPSPHPIKDKLKGKDETDSPTVHLGLDSDSESELVIDLGEDHSGREGRKNKKEPKEPSPKQDVVGKTPPSTTVGSHSPPETPVLTRSSAQTSAAGATATTSTSSTVTVTAPAPAATGSPVKKQRPLLPKETAPAVQRSCGTSSTVQQKEITQSPSTSTITLVTSTQSSPLVTSSGSMSTLVSSVNADLPIATASADVAADIAKYTSKMMDAIKGTMTEIYNDLSKNTTWKAQLAEDSQGLRIEIEKLQWLHQQELSEMKHNLELTMAEMRQSLEQERDRLIAEVKKQLELEKQQAVDETKKKQWCANFKKEAIFYCCWNTSYCDYPCQQAHWPEHMKSCTQSAYCSSSRKADAEVNTETLKLSPSQGSSSSTQSAPFRKRPAPSKEKETFSLRKAKESGSTLDLSGSRETPSSILLGSNQGSDHSRSNKSSWSSSDEKRGSTRSDHNTPSTQHGRSLLPGKESRAGTPFLGTSK

SEQ ID NO: 12932 - protein, 63 aa, Homo sapiens; identical to SEQ ID NO: 8603
  DOMAIN (13)..(63): Actins proteins domain identified by eMATRIX, accession number BL00406E, p-value=1.000e-40, raw score of 8.44
  DOMAIN (1)..(63): Actin domain identified by PFam, accession name actin, E- value=1.8e-38, PFam score of 127.5
  misc_feature (1)...(63): Xaa = X or * as defined in Table 2

SEQ ID NO: 12933 - protein, 399 aa, Homo sapiens
  DOMAIN (31)..(66): Actins proteins domain identified by eMATRIX, accession number BL00406A, p-value=1.000e-40, raw score of 9.95
  DOMAIN (24)..(399): Actin domain identified by PFam, accession name actin, E- value=1.2e-284, PFam score of 935.3
LSRRCQLSHSVLPPLRRRVSLPVAMEEEIAALVIDNGSGMCKAGFAGDDAPRAVFPSIVGRPRHQGVMVGMGQKDSYVGDEAQSKRGILTLKYPIEHGIVTNWDDMEKIWHHTFYNELRVAPEEHPVLLTEAPLNPKANREKMTQIMFETFNTPAMYVAIQAVLSLYASGRTTGIVMDSGDGVTHTVPIYEGYALPHAILRLDLAGRDLTDYLMKILTERGYSFTTTAEREIVRDIKEKLCYVALDFEQEMATAASSSSLEKSYELPDGQVITIGNERFRCPEALFQPSFLGMESCGIHETTFNSIMKCDVDIRKDLYANTVLSGGTTMYPGIADRMQKEITALAPSTMKIKIIAPPERKYSVWIGGSILASLSTFQQMWISKQEYDESGPSIVHRKCF

SEQ ID NO: 12934 - protein, 135 aa, Homo sapiens
  DOMAIN (77)..(127): Actins proteins domain identified by eMATRIX, accession number BL00406E, p-value=7.492e-16, raw score of 8.44
  DOMAIN (2)..(132): Actin domain identified by PFam, accession name actin, E- value=1.2e-27, PFam score of 92.1
SRFPEGLFQPFFPGMKSCGIHETTFHSHIIKFDVAIRKDLYANTLLPGGNHQVSGALLTGMQKEIHAPAAQATLRFKIIAPPGSASTRWVGSVGSILASLSTFQQMWISKQEYDESGPLHSSTAKCFLNGLSQIA

SEQ ID NO: 12935 - protein, 762 aa, Homo sapiens
  DOMAIN (503)..(551): Receptor tyrosine kinase class II proteins domain identified by eMATRIX, accession number BL00239B, p-value=1.000e-40, raw score of 25.15
  DOMAIN (130)..(354): Tropomyosins domain identified by PFam, accession name Tropomyosin, E-value=1.2e-102, PFam score of 322.2
  misc_feature (1)...(762): Xaa = X or * as defined in Table 2
MGRDWNSLESLEEDRKMRESLEHARDLLNCCDQNADHHMDSEVQAEVVSEGDEELIGKWSKAYCHRCEQKDDLKWELIFKREAEHKSLEILQPDHVVEKKNPGGGRNQSTSSSWVGTVAEITTIEAVKCKIQVLQQQADDAEERAERSQREFREERRAREQAEAEVASLNRRIQLVEEELDRAQERLATALQKLEEAEKSLADESERRYXRLFENRALKRLKEKIGTSREIQLKEAKHIAEEADRKYEEVARKLVIIEGDLERTEERAELAESRCREMDEQIRLMDQNLKCLSAAEEKYSQKEDKYEEEIKILTDKLKEAETRAEFAERSVAKLEKTIDDLEDTNSTSGDPVEKKDETPFGVSVAVGLAVFACLFLSTLLLVLNKCGRRNKFGINRPAVLAPEDGLAMSLHFMTLGGSSLSPTEGKGSGLQGHIIENPQYFSDACVHHIKRRDIVLKWELGEGAFGKVFLAECHNLLPEQDKMLVAVKALKEASESARQDFQREAELLTMLQHQHIVRFFGVCTEGRPLLMVFEYMRHGDLNRFLRSHGPDAKLLAGGEDVAPGPLGLGQLLAVASQVAAGMVYLAGLHFVHRDLATRNCLVGQGLVVKIGDFGMSRDIYSTDYYRVGGRTMLPIRWMPPESILYRKFTTESDVWSFGVVLWEIFTYGKQPWYQLSNTEAIDCITQGRELERPRACPPEVYAIMRGCWQREPSNATASRMCTPGCKPWPRHLLSTWMSWARGPAQGLGVVSRNTGACPQHPP

SEQ ID NO: 12936 - protein, 209 aa, Homo sapiens
  DOMAIN (70)..(99): TROPOMYOSIN SIGNATURE domain identified by eMATRIX, accession number PR00194C, p-value=1.900e-35, raw score of 6.38
  DOMAIN (5)..(209): Tropomyosins domain identified by PFam, accession name Tropomyosin, E-value=2e-144, PFam score of 452.2
WAWNQAEAEVASVNGRIQLVEEELDCAQERLATALQKLEEAGKAADESERGMKVIENRALKDEEKMELQEIQLKEAKHIAEEADRKYEEVARKLVIIEGDLERTEERAELAESRCREMDEQIRLMDQNLKCLSAAEEKYSQKEDKYEKEIKILTNKLREAETRAEFAERSVAKLEKTIDDLEDKLKCTKEEHLCTQRMLDQTLLDLNEM

SEQ ID NO: 12937 - protein, 79 aa, Homo sapiens
  DOMAIN (30)..(79): Actins proteins domain identified by eMATRIX, accession number BL00406E, p-value=7.000e-33, raw score of 8.44
  DOMAIN (4)..(79): Actin domain identified by PFam, accession name actin, E- value=3e-35, PFam score of 117.0
QCCSGGTHGNPAIGDRMQKQILPWAPAQMKIRFMAPPERKYSVWIAAPILASLSTSSRMWISKQEYDESGPSIVHRKCF

SEQ ID NO: 12938 - protein, 130 aa, Homo sapiens
QVSAPHGAGASGVPPAGESVAPSGTSDGRGRWSGVEWVEEIKSLLLLFGGQFASSQETYGKSPFWILSIPSEDIARNLMKRTVCAKSIFELWGHGQSPEELYSSLKNYPVEKMVPFLHSDSTYKIKISHF

SEQ ID NO: 12939 - protein, 395 aa, Homo sapiens
  DOMAIN (20)..(55): Actins proteins domain identified by eMATRIX, accession number BL00406A, p-value=1.000e-40, raw score of 9.95
  DOMAIN (13)..(395): Actin domain identified by PFam, accession name actin, E- value=6.6e-219, PFam score of 719.6
  misc_feature (1)...(395): Xaa = X or * as defined in Table 2
ADPPPVHTRRQLTMDDDIAALVVDNGSGMCKAGFAGDDAPRAVFPSIVGRPRHQGVMVGMGQKDSYVGDEAQSKRGILTLKYPIEHGIVTNWDDMEKIWHHTFYNELRVAPEEHPVLLTEAPLNPKANREKMTQIMFETFNTPAMYVAIQAVLSLYASGRTTGIVMDSGDGVTHTVPIYEGYALPHAILRLDLAGRDLTDYLMKILTERGYSFTTTAEREIVRDIKEEAVLRRPGLRARDGHGASSSSLEKSYELPDGQVITIGNERFRCPEALFQPSFLGMESCGIHETTFNSIMKCDVDIRKDLYANTVLSGGTHQFPLPCRPGCXKKITALEPATMKIRIIAPPEAQSTPLWNRGAPILASLVHLPAKMWDQKSREYDESGPLPFVHRKCFF

SEQ ID NO: 12940 - protein, 51 aa, Homo sapiens
LRSLFLLLQWLLAIVVRHILTGPQKQDNSRSTESKRSKVRFQVSLPSSPSR

SEQ ID NO: 12941 - protein, 127 aa, Homo sapiens
KMCDNCCKDSAFERKNITEYCRDLIKILKQAEELNEKLTPLKLIDSWMGKGAAKLRVAGVVAPTLPREDLEKIIAHFLIQQYLKEDYSFTAYATISYLKIGPKANLLNNEAHAITMQVTKSTQNSFR

SEQ ID NO: 12942 - protein, 103 aa, Homo sapiens
FFFFISALKALFAFLQILLFQVNVLRITAHIVISFINLLSVTPSKAFLLLAFIFCREDYSFTAYATISYLKIGPKANLLNNEAYVITMQVTKSTQNSFRVNGY

SEQ ID NO: 12943 - protein, 58 aa, Homo sapiens
  DOMAIN (27)..(56): Mammalian defensins proteins domain identified by eMATRIX, accession number BL00269B, p-value=6.327e-15, raw score of 19.17
  DOMAIN (1)..(52): Defensin propeptide domain identified by PFam, accession name Defensin_propep, E-value=3.8e-18, PFam score of 73.7
MRTFALLTAMLLLVAHAQAEPLQARADEAAAQEQPGADDQEMAHAFTWHESAALPLSA

SEQ ID NO: 12944 - protein, 890 aa, Homo sapiens
  DOMAIN (769)..(794): Bromodomain proteins domain identified by eMATRIX, accession number BL00633B, p-value=6.318e-12, raw score of 13.82
  DOMAIN (739)..(827): Bromo domain identified by PFam, accession name bromodomain, E-value=3.1e-33, PFam score of 119.2
GKHKLLSTGPTEPWSIREKLCLASSVMRSGDQNWVSVSRAIKPFAEPGRPPDWFSQKHCASQYSELLETTETPKRKRGEKGEVVETVEDVIVRKLTAERVEELKKVIKETQERYRRLKRDAELIQAGHMDSRLDELCNDIKKKLEEEEAEVKRKATDAAYQARQAVKTPPRRLPTVMVRSPIDSASPGGDYPLGDLTPTTMEEATSGVTPGTLPSTPVTSFPGIPDTLPPGSAPLEAPMTPVTDDSPQKKMLGQKATPPPSPLLSELLKKGSLLPTSPRLVNESEMAVASGHLNSTGVLLEVGGVLPMIHGGEIQQTPNTVAASPAASESVSQATIVMMPALPAPSSAPAVSTTESVAPVSQPDNCVPMEAVGDPHTVTVSMDSSEISMIINSIKEECFRSGVAEAPVGSKAPSIDGKEELDLAEKMDIAVSYTGEELDFETVGDIIAIIEDKVDDHPEVLDVAAVEAALSFCEENDDPQSLPGPWEHPIQQERDKPVPLPAPEMTVKQERLDFEETENKGIHELVDIREPSAEIKVEPAEPEPVISGAEIVAGVVPATSMEPPELRSQDLDEELGSTAAGEILEADVAIGKGDETPLTNVKTEASPESMLSPSHGSNPIEDPLEAETQHKFEMSDSLKEESGTIFGSQIKDAPGEDEEEDGVSEAASLEEPKEEDQGEGYLSEMDNEPPVSESDDGFSIHNATLQSHTLADSIPSSPASSQFSVCSEDQEAIQAQKIWKKAIMLVWRAAANHRYANVFLQPVTDDIAPGYHSIVQRPMDLSTIKKNIENGLIRSTAEFQRDIMLMFQNAVMYNSSDHDVYHMAVEMQRDVLEQIQQFLATQLIMQTSESGISAKSLRGRDSTRKQDASEKDGGTRGRRCAIEADMKMKK

SEQ ID NO: 12945 - protein, 136 aa, Homo sapiens
  DOMAIN (27)..(75): Bromo domain identified by PFam, accession name bromodomain, E-value=2.1e-06, PFam score of 27.0
  misc_feature (1)...(136): Xaa = X or * as defined in Table 2
YANVFLQPVQDDIAPGSPSIGQRPMDLSTIKKNIXNGXSEAPADFQRXHMLMFQNLLMYHSSDHYFYHIAIEMQRDVLEQIQQFLATQLIMQTSESGISAKSLRGRDSTRQQDASEMDGGTRGRRCAIEADMKMKK

SEQ ID NO: 12946 - protein, 35 aa, Homo sapiens
ISAKSARGRDSTRKQDASEKDSVPMGSPAFLLSLF

SEQ ID NO: 12947 - protein, 957 aa, Homo sapiens
  DOMAIN (843)..(863): BROMODOMAIN SIGNATURE domain identified by eMATRIX, accession number PR00503D, p-value=4.094e-15, raw score of 20.81
  DOMAIN (779)..(868): Bromo domain identified by PFam, accession name bromodomain, E-value=5.1e-24, PFam score of 87.5
GKHKLLSTGPTEPWSIREKLCLASSVMRSGDQNWVSVSRAIKPFAEPGRPPDWFSQKHCASQYSELLETTETPKRKRGEKGEVVETVEDVIVRKLTAERVEELKKVIKETQERYRRLKRDAELIQAGHMDSRLDELCNDIATKKKLEEEEAEVKRKATDAAYQARQAVKTPPRRLPTVMVRSPIDSASPGGDYPLGDLTPTTMEEATSGVTPGTLPSTPVTSFPGIPDTLPPGSAPLEAPMTPVTDDSPQKKMLGQKATPPPSPLLSELLKKGSLLPTSPRLVNESEMAVASGHLNSTGVLLEVGGVLPMIHGGEIQQTPNTVAASPAASGAPTLSRLLEAGPTQFTTPLASFTTVASEPPVKLVPPPVESVSHATIVMMPALPAPSSAPAVSTTESVAPVSQPDNCVPMEAVGDPHTVTVSMDSSEISMIINSIKEECFRSGVAEAPVGSKAPSIDGKEELDLAEKMDIAVSYTGEELDFETVGDIIAIIEDKVDDHPEVLDVAAVEAALSFCEENDDPQSLPGPWEHPIQQERDKPVPLPAPEMTVKQERLDFEETENKGIHELVDIREPSAEIKVEPAEPEPVISGAEIVAGVVPATSMEPPELRSQDLDEELGSTAAGEIVEADVAIGKGDETPLTNVKTEASPESMLSPSHGSNPIEDPLEAETQHKFEMSDSLKEESGTIFGSQIKDAPGEDEEEDGVSEAASLEEPKEEDQGEGYLSEMDNEPPVSESDDGFSIHNATLQSHTLADSIPSSPASSQFSVCSEDQEAIQAQKIWKKAIMLVWRAAANHRYANVFLQPVTDDIAPGYHSIVQRPMDLSTIKKNIENGLIRSTAEFQRDIMLRFQNAVMYNSSDHDVYHMAVEMQRDVLEQIQQFLATQLLMQTSESGISAKSLRGRDSTRKQDASEKDSVPMGSPAFLLSLFDGGTRGRPLCPLKPDMKDEKSESPSELPPL

SEQ ID NO: 12948 - protein, 203 aa, Homo sapiens
  DOMAIN (90)..(117): Serpins proteins domain identified by eMATRIX, accession number BL00284D, p-value=7.652e-20, raw score of 16.34
  DOMAIN (19)..(203): Serpins (serine protease inhibitors) domain identified by PFam, accession name serpin, E-value=4.6e-23, PFam score of 80.6
PRGENRFKAQPEWRKTPCQMMLSQSTFRKTYIGKIFTTILALPYVGKELNMIIMLPDETTDLSTVEKDSTHAKFVEWTSLDMMAEEEVKLSIPRFKLEESYDMESVLRNLGMTDAFEAGARANFSGMSQTDLSLVQRSCTKSICGRSNEGRPREAASPPKVAIMMMRCARFCPPPPAPDHPFLFFIQHRKTNGILFCGRFSSP

SEQ ID NO: 12949 - protein, 716 aa, Homo sapiens
  DOMAIN (68)..(99): HIT family proteins domain identified by eMATRIX, accession number BL00892A, p-value=4.500e-13, raw score of 18.17
  DOMAIN (48)..(159): HIT family domain identified by PFam, accession name HIT, E- value=1.5e-05, PFam score of 12.5
MAEEQVNRSAGLAPDCEASATAETTVSSVGTCEAAGKSPEPKDYDSTCVFCRIAGRQDPGTELLHCEVGGDARPGNEDLICFKDIKPAATHHYLVVPKKHIGNCRTLRKDQVELVENMVTVGKTILERNNFTDFTNVRMGFHMPPFCSISHLHLHVLAPVDQLGFLSKLVYRVNSYWFITTNLQGNGEISKEMVKFQSNFEEQVLKGCRESWKHTPSGTITWKYTVLLSQAAPESHASPLTSYQRWETPNHQAFTGEEAPPTAAGVSDSEREKRRDSACLAELPLPALQALSLWRLGFGREKEGPSAGRAGARWAAAMALSCTLNRYLLLMAQEHLEFRLPEIKSLLLLFGGQFASSQETYGKVPFLHSDSTYKIKIHTFNKTLTQEEKIKRIDALEFLPFEGKVNLKKPQHVFSVLEDYGLDPNCIPENPHNIYFGRWIADGQRELIESYSVKKRHFIGNTSMDAGLSFIMANHGKVKENDIVFDPFVGTGGLLIACAHFGAYVYGTDIDYNTVHGLGKATRKNQKWRGPDENIRANLRQYGLEKYYLDVLVSDASKPSWRKGTYFDAIITDPPYGIRESTRRTGSQKEIPKGIEKWEKCSGFQQQISNISLIILFGFLDVICGTLGGNLKVFKDDLFSVFLFKPSYLKCFEVIWELPIHPAESHLYHSVKAPYSPSFKFVCDLILPACWTRTRVSRGQGVKGCHPDSPLSWFNT

SEQ ID NO: 12950 - protein, 208 aa, Homo sapiens
  DOMAIN (5)..(36): Ubiquitin-activating enzyme proteins domain identified by eMATRIX, accession number BL00536E, p-value=2.607e-18, raw score of 16.94
  DOMAIN (16)..(160): Repeat in ubiquitin-activating (UBA) pro domain identified by PFam, accession name UBACT_repeat, E-value=3.6e-27, PFam score of 102.8
YNLVTFRLAVLSFEKDDDHNGHIDFITAASNLRAKMYSIEPADRFKTKRIAVKIILVKPTTTGTVSGLVCFEMIKVTGGYPFAAYKNCFLNLSHSIFVVFTETTEVRKTKIRNGISFTIWDRWTVHGKEDFTLLDFINAVKEKYGIEPTMVVQGVKMLYVPVMPGHAKRLKLTMHKLVKPTTEKKYVDLTVSFAPDIDGDEDLPGTSK

SEQ ID NO: 12951 - protein, 58 aa, Homo sapiens
  DOMAIN (17)..(33): CYCLOPHILIN PEPTIDYL-PROLYL CIS-TRANS ISOMERASE SIGNATURE domain identified by eMATRIX, accession number PR00153E, p-value= 7.632e-17, raw score of 9.10
  DOMAIN (2)..(58): Cyclophilin type peptidyl-prolyl cis-tr domain identified by PFam, accession name pro_isomerase, E-value=1.2e-23, PFam score of 84.9
SFELFADKVPKTAWLDGKHVVFGKVKEGMNIVEAMERFGSRNGKTSKKITIADCGQLE

SEQ ID NO: 12952 - protein, 434 aa, Homo sapiens
  DOMAIN (56)..(80): Dehydrogenase E1 component domain identified by eMATRIX, accession number PF00676C, p-value=1.514e-17, raw score of 16.88
  DOMAIN (1)..(173): Dehydrogenase E1 component domain identified by PFam, accession name E1_dehydrog, E-value=6.2e-08, PFam score of -37.5
  misc_feature (1)...(434): Xaa = X or * as defined in Table 2
GNSPPSELKWKAKSEDLRHRGLKAQAEIKGSTQQIGFTTDPRMARSSPYPTDVARVVNAPIFHVNSDDPEAVMYVCKVAAEWRSTFHKDVVVDLVCYRRNGHNEMDEPMFTQPLMYKQIRKQKPVLQKYAELLVSQGVVNQPEYECVSMHGVRNKPSYNSTKSSMDGLILHPATGLVFVLSKQCEEIHQPVVWTCEQREAENATAEENRVLLAMVNPTVFFDIAVDGEPLGRVSFEVGRAAACGNGAQKVGRGRENFPCLXATGEKGFWLXGVPCFHRLFPRVLCVQGGELQQRHXWPLVGKPHSMGKKIXKIEELPSLKHTGSPGILSPWQNAGPQTTNGFPSFSICTAKTEWLEWPSHVVFWHKXKEGMNIVEAHWSRFGSRNGKTQQRRSPFADCGQLLISLTCVFILTTKIISFCRLRRAPLQPHLLAVS

SEQ ID NO: 12953 - protein, 52 aa, Homo sapiens
  misc_feature (1)...(52): Xaa = X or * as defined in Table 2
XQHTFCKRCGVQSFYTPRSNPGGFGIAPHCLDEGTVRSMVTEEFNGSDWEKA

SEQ ID NO: 12954 - protein, 133 aa, Homo sapiens
  DOMAIN (68)..(101): PROLINE-RICH PROTEIN 3 domain identified by eMATRIX, accession number DM00215, p-value=9.237e-09, raw score of 19.43
CGDRGALRPPSCAGRSGPGPPRPPRPPRPLPWHPAPPAHGAPLARPGARARRSEKPPSEKPRLRRSSPRAQEEGPGEPPPPELALLPPPPPPPPTPAPRRPRRPPGPGRAAGALGDVPEAAEAYLERVPPSSC

SEQ ID NO: 12955 - protein, 79 aa, Homo sapiens
FSCLSLLKSWDYRALPPSPANLFLVETGFHHVGQASLKLLTSGDPPASASQTVGITGMSHHAWPVSSFYIWSHWAPRNS

SEQ ID NO: 12956 - protein, 204 aa, Homo sapiens
VVEFPVLTMAATSGILSALGNFLAQMIEKKRKKENSRSLDVGGPLRYAVYGFFFTGPLSHFFYFFMEHWIPPEVPLARVRRLLLDRLFFAPAFLMLFFLIMNFLEGKDASTFAAKMRGGFWPAAEDETCRVWTPLQFININYVPFESSGCFFGQPGQLLFWYAYLALLGEVTTRWENIRCTCGRGSGGLHPPKREQKPIQSGCH

SEQ ID NO: 12957 - protein, 141 aa, Homo sapiens
ELESRSVTQAGVQWCDLGSLQPPPLSFKQFSFLSLLSSWDYRHVPPCPANVCILVEMGLVGQAGLELLISSDTPISVSQSAGIISVSHGTQPHIGNFLEQLKVVQLCYTSFLCFTKSSTVKHIQLIIIKITLRNTKNKARI

SEQ ID NO: 12958 - protein, 122 aa, Homo sapiens
  misc_feature (1)...(122): Xaa = X or * as defined in Table 2
ISGRSTFSLFSRQGLSALSPRLECSVAISAHCNLRLPGSSNGTTGAXHHTRLILYFLAEMGFHHVGQAGFEVLTSSNPPASASTSARITGMSNRTGHLFNFHPXMCYKYRCGSLAGRGGSRW

SEQ ID NO: 12959 - protein, 126 aa, Homo sapiens
YISLNVTTHLIFFFFFLRQGLCSVTQAGVQWCNLGSLQPLPPRFKNWDYRCVTPHLANFVFLVEMGFLPASASQSAGITGVSHCTQLGVFICICYGSSHGVRQSWHQFCSSKLLVKSGRVGVGLLG

SEQ ID NO: 12960 - protein, 148 aa, Homo sapiens
SLCFCFLEVSLPACQETYGKSPFWILSIPFEDIARNLMKRTVCAKSIFELWGHGQSPEELYSSLKNYPVEKMVPFLHSDSTYKIKIHTFNKTLTQEEKIKRIDALEFLPFEGKVNLKKPQHVFSVLEDYGLDPNCIPENPHNIYFGRW

SEQ ID NO: 12961 - protein, 60 aa, Homo sapiens
WQKLLFLFGTESCSVARVGVQWRHLSSPKPPPPGSSNSPASASRVATGAHLHARLIFVFL

SEQ ID NO: 12962 - protein, 94 aa, Homo sapiens
IFASTAPKRSWARLGPPQILVSVATKASFGAPTIPSRPGPQSVFANSDLFPAPPQIPSRPVRIPPGIPPGVPRRPPAAPSRPTIIRPAEPSLLD

SEQ ID NO: 12963 - protein, 43 aa, Homo sapiens
  misc_feature (1)...(43): Xaa = X or * as defined in Table 2
MSVFXXXXXXXXXXXXXXXXXXNEETNHPLGVVYRLSDSTQYI

SEQ ID NO: 12964 - protein, 37 aa, Homo sapiens
QTTMCYGKCARCIGHSLVGLALLCISNKRPFELPCVL

SEQ ID NO: 12965 - protein, 277 aa, Homo sapiens
EWCLLSPPEGHTFHLIWGITELKTKRRGRKPSRPPMCYGKCARCIGHSLVGLAILCIAANILLYFPKGETKNASENHLSRFVWFFSGIVGRLVLLMLPAQHFVLHWGLEQDDCCGCCGHENCGKRCAMLSSVIGWLSIGIAGSGLLWSIVVQPLGLARKDPLCLDSLSGQWKLQPLPSTEGPVTFWITSTWSECTEPKHIVKWNVSLFSILLALGGPELILCLIQVINGSVLGGICGFCCSHQQQYGLAKRTNPGTEPQSFLYFHCNLSYLHLYSIC

SEQ ID NO: 12966 - protein, 67 aa, Homo sapiens
RGPVLLDTSTWARCNEPKPIVEWNDTLFSNLLASGGIEFILCLIQVINGVLGGICGFCCSHQQQYDC

SEQ ID NO: 12967 - protein, 141 aa, Homo sapiens
RLSLTLVAQAAVQWHNLGSLQPPPPGFKRFSCLSLPSSQDHRHTPPCPANSFVFLVETRLHHAGQAGLKLPTSGDTPSSASQSARITGVSHRARCWDSNSTIFLGSLANSNWRNVFLIVGGERIKGKHTHFNTHSMSEFEE

SEQ ID NO: 12968 - protein, 193 aa, Homo sapiens
  DOMAIN (2)..(17): WILM'S TUMOUR PROTEIN SIGNATURE domain identified by eMATRIX, accession number PR00049D, p-value=6.644e-09, raw score of 0.00
  DOMAIN (134)..(187): F-box domain identified by PFam, accession name F-box, E- value=2.1e-05, PFam score of 31.4
PPPPLPPPPSPPPPGPFAAARGERGGAAGAAMEPDSVIEDKTIELMNTSVMEDQNEDESPKKNTLWQISNGTSSVIVSRKRPSEGNYQKEKDLCIKYFDQWSESDQVEFVEHLISRMCHYQHGHINSYLKPMLQRDFITALPEQGLDHIAENILSYLDARSLCAAELVCKEWQRVISEGMLWKKLIERMVRTD

SEQ ID NO: 12969 - protein, 334 aa, Homo sapiens
  DOMAIN (265)..(276): Trp-Asp (WD) repeat proteins proteins domain identified by eMATRIX, accession number BL00678, p-value=5.800e-10, raw score of 9.67
  DOMAIN (105)..(316): WD domain, G-beta repeat domain identified by PFam, accession name WD40, E-value=4.9e-37, PFam score of 136.5
  misc_feature (1)...(334): Xaa = X or * as defined in Table 2
MWLILAGLAWAGLWVSDGLKDVLVMAKGKSRRGKSAPKHIMSLGPLLMIAFAICHFASVMGFHYLEVNLRLQQCFKYQLIETAFAVLVQSVLRIYSSRIWDKTSLECLKVLTGHTGSVLCLQYDERVIVTGSSDSTVRVWDVNTGEVLNTLIHHNEAVLHLRFSNGLMVTCSKDRSIAVWDMASATDITLRRVLVGHRAAVNVVDFDDKYIVSASGDRTIKNRDKAEVAYTNLVWSTSTCEFVRTLNGHKRGIACLQYRDRLVVSGSSDNTIRLWDIECGACLRVLEGHEELVRCIRFDNKRIVSGAYDMGFSSLELLATWLPNAXGSSFTAEL

SEQ ID NO: 12970 - protein, 86 aa, Homo sapiens
  misc_feature (1)...(86): Xaa = X or * as defined in Table 2
HSGSAGMHWNILFLVHCMQAHIXLFDRLLHMMXCNGRGPXFALCTRCSQXDSGANWDKXKNILPLRNFGWLGFNRDLGSRGWVPEV

SEQ ID NO: 12971 - protein, 145 aa, Homo sapiens
  DOMAIN (74)..(92): Fumarate reductase / succinate dehydrogenase FAD-binding site proteins domain identified by eMATRIX, accession number BL00504D, p-value=5.000e-20, raw score of 10.43
  DOMAIN (48)..(143): FAD binding domain identified by PFam, accession name FAD_binding_2, E-value=2e-54, PFam score of 193.4
PGSTISWDCAAATTDVSGVRGLSRLPSARRLALALAKAVENYGMPFSRTEDGKIYQRAFGGHSLKFGKGGQAHRCCCVADRTGHSILHTLYGRSLRYDTSCFVEYFALDLLMESGECRGVFALCIQDGSIHRIRAKNTIVATGLL

SEQ ID NO: 12972 - protein, 1028 aa, Homo sapiens
  DOMAIN (612)..(627): BETA G-PROTEIN (TRANSDUCIN) SIGNATURE domain identified by eMATRIX, accession number PR00319B, p-value=8.138e-10, raw score of 11.47
  DOMAIN (280)..(625): WD domain, G-beta repeat domain identified by PFam, accession name WD40, E-value=2e-53, PFam score of 190.9
MAASAWLQLWQKAKGKRALRVAGAGGRESAHLILSPCSGPRLLGWPGPVAASCHAGLLPGTGRGWRATVLQRFTYPCSNTSVMEDQNEDESPKKNTLWQISNGTSSVIVSRKRPSEGNYQKEKDLCIKYFDQWSESDQVEFVEHLISRMCHYQHGHINSYLKPMLQRDFITALPEQGLDHIAENILSYLDARSLCAAELVCKEWQRVISEGMLWKKLIERMVRTDPLWKGLSERRGWDQYLFKNRPTDGPPNSFYRSLYPKIIQDIETIESNWRCGRHNLQRIQCRSENSKGVYCLQYDDEKIISGLRDNSIKIWDKTSLECLKVLTGHTGSVLCLQYDERVIVTGSSDSTVRVWDVNTGEVLNTLIHHNEAVLHLRFSNGLMVTCSKDRSIAVWDMASATDITLRRVLVGHRAAVNVVDFDDKYIVSASGDRTIKNRDKAEVAYTNLRPGLTLSPRLVFSILRNCQTVFQRRCTILQSCQWYMRVSACSEEPPFHNQHWIALLYLAPQITKCVASGFALDSWEAKQLGFICGNLLPQSHQLVWSTSTCEFVRTLNGHKRGIACLQYRDRLVVSGSSDNTIRLWDIECGACLRVLEGHEELVRCIRFDNKRIVSGAYDGKIKVWDLQAALDPRAPASTLCLRTLVGFLVLNYWLRGYQMPKGVRSQLSYEAGIGSRRWVDAKQPNSSTQGLCTHCMHFPSYLHGCFLIIQVSAQFHSKAGLLPHGIQVAASSPKSMSYPLSVSGGAKSLPSSRKSMSYPLSICGGHSGVADTITHRSGPKLRQEALLLPIHPSSLLSFDKLCRVHTPVPGAWGGANTNGTIWWGTGEEWFFRGKRGSYLKRGLPRSPVAILERGGQILEGHSSGHCPIFSCQFDVSLCQSSLKGHSDTAKPPNVFFLILLRRTITRIIMKPERVRMRCDPLQPADHLVSAQFCLFKLFAGRTPAQGQSSMAFTGRCSGLLQGPTLKAGAGELVAGIQALGAEGTSRRKEREFREGVQGGEGLGMKTTAHCPFANGIYRPHFMHENTEA

SEQ ID NO: 12973 - protein, 87 aa, Homo sapiens
FAICHFASVMGFHYLEVNLRLQQCFKYQLIETAFAVLVQSVLRIYSSRIWDKTSLECLKVLTGHTGSVLCLQYDERVIVTGSSDSTV

SEQ ID NO: 12974 - protein, 53 aa, Homo sapiens
DLYAATYSHSHTILVWSTSTCEFVRTLNGHKRGIACLQYRDRLVVSGSSDNTI

SEQ ID NO: 12975 - protein, 128 aa, Homo sapiens
  misc_feature (1)...(128): Xaa = X or * as defined in Table 2
FVFAAARGERGGFAGAVMEPDSVIEDKTIELMLPKCMFGILLKKAGYSKRKESWKMLDCCLFSDXSERENPHSFWIGGSEVQNIFQNTSVMEDQNEDESPKKNTLWQISNGTSSVIVSRKRPSEGNYH

SEQ ID NO: 12976 - protein, 416 aa, Homo sapiens
  DOMAIN (349)..(360): Trp-Asp (WD) repeat proteins proteins domain identified by eMATRIX, accession number BL00678, p-value=8.800e-10, raw score of 9.67
  DOMAIN (326)..(400): WD domain, G-beta repeat domain identified by PFam, accession name WD40, E-value=5.6e-09, PFam score of 43.3
MAGCRSRAMPRREAAKAGEKSSPVPVGGTALSTGPPQPLALVLSPSLHGAGRACRLLRVRARQAHAHLELQLARKCPHSPCSRSCLSLHTSLQAEGASSGLGQPRKGLPQCSGGLKGSSSAAKVGAQAEEVPRASEASEDCQHAVTSHWDYSCSLMLLSFTLKDFLWRFLKGKTVVTSTDSAIGVGITCYSKSRSPIPGLQTSTSLWTARNRATWQEPCGTNTSVLEDQDEDKSPKKNTPWQISNGTSFVIISRKRPSEGNYQKEKDLYIQYFNQGSESDQLEFVEHLISRMCHYHHGRINSYLKPMLQQDFITALPEQGLDHIAENILLYLVTRSLCAAELDERVIVTGSSDSTVRVWEVNTGEVLNTLIHHNEDVLHLRFSSGLMVTCSKDRSIAVWDMASATDITLRGVLVVH

SEQ ID NO: 12977 - protein, 550 aa, Homo sapiens
  DOMAIN (386)..(397): Trp-Asp (WD) repeat proteins proteins domain identified by eMATRIX, accession number BL00678, p-value=3.400e-10, raw score of 9.67
  DOMAIN (238)..(527): WD domain, G-beta repeat domain identified by PFam, accession name WD40, E-value=1.2e-61, PFam score of 218.2
RGGAAGAAMEPDSVIEDKTIELMCSVPRSLWLGCANLVESMCALSCLQSMPSVRCLQISNGTSSVIVSRKRPSEGNYQKEKDLCIKYFDQWSESDQVEFVEHLISRMCHYQHGHINSYLKPMLQRDFITALPEQGLDHIAENILSYLDARSLCAAELVCKEWQRVISEGMLWKKLIERMVRTDPLWKGLSERRGWDQYLFKNRPTDGPPNSFYRSLYPKIIQDIETIESNWRCGRHNLQRIQCRSENSKGVYCLQYDDEKIISGLRDNSIKIWDKTSLECLKVLTGHTGSVLCLQYDERVIVTGSSDSTVRVWDVNTGEVLNTLIHHNEAVLHLRFSNGLMVTCSKDRSIAVWDMASATDITLRRVLVGHRAAVNVVDFDDKYIVSASGDRTIKVWSTSTCEFVRTLNGHKRGIACLQYRDRLVVSGSSDNTIRLWDIECGACLRVLEGHEELVRCIRFDNKRIVSGAYDGKIKVWDLQAALDPRAPASTLCLRTLVEHSGRVFRLQFDEFQIISSSHDDTILIWDFLNVPPSAQNETHSPSGTYTYISR

SEQ ID NO: 12978 - protein, 59 aa, Homo sapiens
  DOMAIN (3)..(43): kw TRANSCRIPTASE REVERSE II ORF2 domain identified by eMATRIX, accession number DM01354Y, p-value=8.958e-10, raw score of 10.69
NFKRFHKTIAIETASYWPKDRHINQRNRESPVINPTTYGQLIVDKGAKNTQWGKDNYFN

SEQ ID NO: 12979 - protein, 118 aa, Homo sapiens
RWASGMSTEPGGSRHSLGIQVRGGWGVTGGEEESLTVPVADTWQAGSFKVATQERNPQRVQMRLRRQKKGNTNKRSKEVRVLQEMQLLQVAAMNYRLRPLEKFGTYFTRMEQLSDKER

SEQ ID NO: 12980 - protein, 130 aa, Homo sapiens
LGERRRASLSLSLTPGRRRGFKVATQERNPQRAQMRLRRQKKGVVPFWGDFLTELQMGLDSAIPGRPWMATPNKRSKEVRVLQEMQLLQVAAMNYRLRPLEKFVTYFTRMEQLSDKESYKLSCQLEPENQ

SEQ ID NO: 12981 - protein, 126 aa, Homo sapiens
  DOMAIN (58)..(71): HAEM PEROXIDASE SUPERFAMILY SIGNATURE domain identified by eMATRIX, accession number PR00458C, p-value=3.057e-09, raw score of 13.74
YGGKEYWDTRRSMVFARHLREVGDEFRSRHLNSTDDADRIPFQEDWMKMKVKLGSALGGPYLGVHLRRKDFIWGHRQDVPSLEGAVRKIRSLMKTHRLDKVFVATDAVRKETVPFSSVAFSRLRAV

SEQ ID NO: 12982 - protein, 229 aa, Homo sapiens
  DOMAIN (154)..(176): Fumarate reductase / succinate dehydrogenase FAD-binding site proteins domain identified by eMATRIX, accession number BL00504A, p-value=3.676e-19, raw score of 10.76
  DOMAIN (207)..(229): FAD binding domain identified by PFam, accession name FAD_binding_2, E-value=1e-10, PFam score of 40.2
MDQDSASTKTCPGTHRKSGPRSREQHGALGAANAHDTVRDGERYDRWSGPRRREQHGALGAANAPDTVRDGERRSLRRDWRDCAEATADVSGVRSLSRLLSARRLALALAKAWPTVLQTGTRGVHFTVDGNKRASAKVSDSISAQYPVVDHEFDAVVVGAGGAGLRAAFGLSEAEFDTACVTKLFPTRSHTVAAQLENYGMPFSRTEDGKIYQRAFGGQSLKFGKGRQA

SEQ ID NO: 12983 - protein, 49 aa, Homo sapiens
VLQSYAEGWKEGTWEEKVDERPCIDQLLYSQDKHESSLSSHFPHLLEEQ

SEQ ID NO: 12984 - protein, 405 aa, Homo sapiens
  DOMAIN (288)..(301): HAEM PEROXIDASE SUPERFAMILY SIGNATURE domain identified by eMATRIX, accession number PR00458C, p-value=3.057e-09, raw score of 13.74
  misc_feature (1)...(405): Xaa = X or * as defined in Table 2
PGAMATLSFVFLLLGAVSWPPASASGQEFWPGQSAADILSGAASRRRYLLYDVNPPEGFNLRRDVYIRIASLLKTLLKTEEWVLVLPPWGRLYHWQSPDIHQVRIPWSEFFDLPSLNKNIPVIEYEQFIAESGGPFIDQVYVLQSYAEGWKEGTWEEKVDERPCIDQLLYSQDKHEYYRGWFWGYEETRGLNVSCLSVQGSASIVAPLLLRNTSARSVMLDRAENLLHDHYGGKEYWDTRRSMVFARHLREVGDEFRSRHLNSTDDADRIPFQEDWMKMKVKLGSALGGPYLGVHLRRKDFIWGHRQDVPSLEGAVRKIRSLMKTHRLDKVFVATDAVRKEYEELKKLLPEMVRFEPTWEELELYKDGGVAIIDQWICAHASSXSAAGEPETSCAGAGGTGRPLT

SEQ ID NO: 12985 - protein, 18 aa, Homo sapiens
  misc_feature (1)...(18): Xaa = X or * as defined in Table 2
IHREXVPAAQGELRGAAE

SEQ ID NO: 12986 - protein, 645 aa, Homo sapiens
  DOMAIN (510)..(523): HAEM PEROXIDASE SUPERFAMILY SIGNATURE domain identified by eMATRIX, accession number PR00458C, p-value=3.057e-09, raw score of 13.74
  misc_feature (1)...(645): Xaa = X or * as defined in Table 2
MATLSFVFLLLGAVSWPPASASGQEFWPGQSAADILSGAASRRRYLLYDVNPPEGFNLRRDVYIRIASLLKTLLKTEEWVLVLPPWGRLYHWQSPDIHQVRIPWSEFFDLPSLNKNIPVIEYEQFIAGAQSLSHAAVSFPKCFSEMDLKWMSFVPPQLEPPLHPKKAATPGCYSDRTRLPVRKAVLRSGRRTACGVCFVVSQCSARDKELHLRDAPSRFVPAPEFHLRGAPSRFVPAPELHLRGAPSRFIPAAFEQILIADLLGVTVPPSWCGSGQSGGPFIDQVYVLQSYAEGWKEGTWEEKVDERPCIDQLLYSQDKHEYYRCLLRLLPLPQGWRSCQSQVSIAIKGSDTTRPPVEKLSVNSLHVSSARAAGSKAWQGSASIVAPLLLRNTSARFERWDYSLQRVFSVGVDFRIDGVTFHSHPWFCDRPADVFTRAAACKAGTCLQETQSLLTWDFVQTRRSMVFARHLREVGDEFRSRHLNSTDDADRIPFQEDWMKMKVKLGSALGGPYLGVHLRRKDFIWGHRQDVPSLEGAVRKIRSLMKTHRLDKVFVATDAVRKEYEELKKLLPEMVRFEPTWEELELYKDGGVAIIDQWICAHARFFIGTSVSTFSFSDSXGKEKFLGLDPKTDVQQVLRRPREGV

SEQ ID NO: 12987 - protein, 427 aa, Homo sapiens
  DOMAIN (288)..(301): HAEM PEROXIDASE SUPERFAMILY SIGNATURE domain identified by eMATRIX, accession number PR00458C, p-value=3.057e-09, raw score of 13.74
PGAMATLSFVFLLLGAVSWPPASASGQEFWPGQSAADILSGAASRRRYLLYDVNPPEGFNLRRDVYIRIASLLKTLLKTEEWVLVLPPWGRLYHWQSPDIHQVRIPWSEFFDLPSLNKNIPVIEYEQFIAESGGPFIDQVYVLQSYAEGWKEGTWEEKVDERPCIDQLLYSQDKHEYYRGWFWGYEETRGLNVSCLSVQGSASIVAPLLLRNTSARSVMLDRAENLLHDHYGGKEYWDTRRSMVFARHLREVGDEFRSRHLNSTDDADRIPFQEDWMKMKVKLGSALGGPYLGVHLRRKDFIWGHRQDVPSLEGAVRKIRSLMKTHRLDKVFVATDAVRKEYEELKKLLPEMVRFEPTWEELELYKDGGVAIIDQWICAHARCLPTSLSAESGSGGFQRFFCPKYSVSEQMVACVHSGHFHTVCLLV

SEQ ID NO: 12988 - protein, 76 aa, Homo sapiens
  misc_feature (1)...(76): Xaa = X or * as defined in Table 2
MXXXXXXXXXXXXXXXXXXXXXXXXXXXXXXXXXXXXXXXXXXXXXXXXXXXXXXXXXXXXXXXXXXXXXXXXXXX

SEQ ID NO: 12989 - protein, 6 aa, Homo sapiens
MAALAS

SEQ ID NO: 12990 - protein, 132 aa, Homo sapiens
FFFFIFKTASHSVVQAGVQWRSLSSMQPPPPGLKQFSHLSLLGSWIKGHLPHPSNFCIFSRDGVSPCWLGWSQTPGLRPQPSPKCLGLTGCEATSPWPASLKFLKNCVFHLPGYVYLLHVLGPRSCKYLQKW

SEQ ID NO: 12991 - protein, 90 aa, Homo sapiens
RRPRQRPTDQTQWFSILPDFSLDLQEGPSVESQTHSDPHIPPVDPTTHLTFNHLSIVCVSLTLSLPHLGSPCLWSPALVSQEAASHQDRR

SEQ ID NO: 12992 - protein, 286 aa, Homo sapiens
MLDSLLALGGLVLLRDSVEWEGRSLLKALVKKSALCGEQVHILGCEVSEEEFREGFDSDINNRLVYHDFFRDPLNWSKTEEAFPGGPLGALRAMCKRTDPVPVTIALDSLSWLLLRLPCTTLCQVLHAVSHQDSCPGDSSSVGKVSVLGLLHEELHGPGPVGALSSLAQTEVTLGGTMGQASAHILCRRPRQRPNYQTQWFSILPDFQPGSPRGALCRVPALIPIPHIPPKEREARDSLILPFQFSSEKQQALLRPRPGQATSHIFYEPDAYDDLDQEDPDDDLDI

SEQ ID NO: 12993 - protein, 50 aa, Homo sapiens
IYIFLLNCIFLIIIIIYFETESCSVAQAGWVQWHDLGSLQALPPGFTPFF

SEQ ID NO: 12994 - protein, 163 aa, Homo sapiens
  misc_feature (1)...(163): Xaa = X or * as defined in Table 2
LGLLHEELHGPGPVGALISLAQTEVTLGGTMGQASAHILCRRPRQRPTDQTQRVSILPDFSLDLQEGPSVESQPYSDPHIPPVSKNAKARTRKCSLVSGHGRENKSCRGWGWGQGFXGWGRVAASFVPQVDPTTHLTFNLHLSKKEREARDSLILPFQFSSEK

SEQ ID NO: 12995 - protein, 165 aa, Homo sapiens
VRKVSVLGLLHEELHGPGPVGALSSLAQTEATLGGYHVGQASAHMLCRRPRQRPTDQTQWFSILPDFSLDLKEGPSVESQPYSDPHIPRVDPTTHLTFNLHLSKKEREARDSLILPFQFSSEKQQALLRPRPGQATSHIFYEPDAYDDLDQEDPDDDLNILPGQI

SEQ ID NO: 12996 - protein, 106 aa, Homo sapiens
HERQMALLKANKDLIPDGMTELTPLLQPLGFEDPVVCEQDVVTAGQDWVTYYDRDYGQQVTGEPQERDKALQELRQELNTLANPFLAKYRDFLKSHELPSHPPPSS

SEQ ID NO: 12997 - protein, 90 aa, Homo sapiens
MTLPRLVSNSWLKQSSHLGLLKHWDYMSEAPHLAKNFLKAYEVVSLSFHVEGSGGCRMAVWHRSGEEEEGSKVCSRFHWDSGVLPKPMTN

SEQ ID NO: 12998 - protein, 78 aa, Homo sapiens
SGEPFISCGRFWWLQDGDLMTLPRLVSNSWLKQSSHLGLLKHWDYMSEAPHLAKNFLKAYEVVSLSFHVEGSGGCRMA

SEQ ID NO: 12999 - protein, 93 aa, Homo sapiens
  misc_feature (1)...(93): Xaa = X or * as defined in Table 2
IHFVLISAHAVGCEGILWGGWSLRGVGVPHSSAKRSXVGIRGPGKGRPGAQLPAGRARASTEVPSGAPCPLLGAKNDRGLHAPKRTGTGPSNH

SEQ ID NO: 13000 - protein, 142 aa, Homo sapiens
  misc_feature (1)...(142): Xaa = X or * as defined in Table 2
IHFVLISAHAVGCEGISPIEEMGVSALSIQEACSPGLQWATSFLASAWVSAPLLQMAHICPIILLGSLKGARATNRFRQSLFVQGVSFPARFPHLDLLLQXPXKNDWTDVSHLEQRGTNPGXRQEXSGPLQPWRAGFLDGQC

SEQ ID NO: 13001 - protein, 180 aa, Homo sapiens
  DOMAIN (66)..(82): Protein kinases ATP-binding region proteins domain identified by eMATRIX, accession number BL00107B, p-value=7.429e-11, raw score of 13.31
  DOMAIN (2)..(143): Eukaryotic protein kinase domain identified by PFam, accession name pkinase, E-value=1.7e-40, PFam score of 148.0
RHERNISHLDLKPQNILLSSLEKPHLKLADFGFAQHMSPWDEKHVLRGSPLYMAPEMVCQRQYDARVDLWSMGVILYEALFGQPPFASRSFSELEEKIRSNRVIELPLRPLLSRDCRDLLQRLLERDPSRCISFQDFFAHPWVDLEHMPSGESLGRATALVVQAVKKDQEGDSAADLSLY

SEQ ID NO: 13002 - protein, 294 aa, Homo sapiens
  DOMAIN (142)..(190): Receptor tyrosine kinase class II proteins domain identified by eMATRIX, accession number BL00239B, p-value=9.746e-15, raw score of 25.15
  DOMAIN (94)..(289): Eukaryotic protein kinase domain identified by PFam, accession name pkinase, E-value=1.6e-63, PFam score of 224.5
RGLRIPTWALQELAGRVTRRGPETGEGRREPGGSASPMRAAFPAGGAGGSVEPPSARPAPQPAGTAARSEEAPARAQAAGMAGPGWGPPRLDGFILTERLGSGTYATVYKAYAKKDTREVVAIKCVAKKSLNKASVENLLTEIEILKGIRHPHIVQLKDFQWDSDNIYLIMEFCAGGDLSRFIHTRRILPEKVARVFMQQLASALQFLHERNISHLDLKPQNILLSSLEKPHLKLADFGFAQHMSPWDEKHVLRGSPLYMAPEMVCQRQYDARVDLWSMGVILYGETSFPCFSP

SEQ ID NO: 13003 - protein, 11 aa, Homo sapiens
RLLWGHHAGQR

SEQ ID NO: 13004 - protein, 104 aa, Homo sapiens
SLLTPLVSPVPACPCPSKSEVSVPQEHPLPCRPLFRVWRNRQSRGCPQGVEHYGAGAWGLLPPVWKSCPPAKTCCKWGLPCPPCGRSCLHSGGAALCLLCGGSA

SEQ ID NO: 13005 - protein, 134 aa, Homo sapiens
TVYTFRSAIVTARAVWVRPRMDRRADLSSATQSASAEKFGGRVSAGHCALPLPARPVTASVYGRLARLRGCLEDSYPSALSAQVFLDSPAVGCGLETRLFIEAALGPPCRATVTSRGHLLDISITKSPGRPCFL

SEQ ID NO: 13006 - protein, 135 aa, Homo sapiens
RVSAGHCALPLPARPVTASVYGRLARLRGCLEDSYPSALSAQVFLDSPAVGCGLETRLFIEAALGPPCRATVTSRGHLLDISITKSPGRPCFLSVCLHGSDQQKRKGAAATAKRKSKGGGVNVEGRLCTWPPEDP

SEQ ID NO: 13007 - protein, 176 aa, Homo sapiens
  DOMAIN (33)..(76): Myelin basic protein domain identified by eMATRIX, accession number BL00569A, p-value=1.000e-40, raw score of 16.70
  DOMAIN (33)..(175): Myelin basic protein domain identified by PFam, accession name Myelin_MBP, E-value=1.6e-84, PFam score of 294.2
QTIQEDSAATSEILDVMASQKRPSQRHGSKYLATASTMDHARHGFLPRHRDTGILDSIGRFFGGDRGAPKRGSGKDSHHPARTAHYGSLPQKSHGRTQDENPVVHFFKNIVTPRTPPPSQGKGAEGHRPGFGYGGRASDYKSAHKGFKGVDAQGTLSKIFKLGGRDSRSGSPMARR

SEQ ID NO: 13008 - protein, 325 aa, Homo sapiens
  DOMAIN (156)..(199): Myelin basic protein domain identified by eMATRIX, accession number BL00569A, p-value=1.000e-40, raw score of 16.70
  DOMAIN (157)..(325): Myelin basic protein domain identified by PFam, accession name Myelin_MBP, E-value=5.5e-75, PFam score of 262.5
RANPFRMGNHAGKRELNAEKASTNSETNRGESEKKRNLGELSRTTSEDNEVFGEADANQNNGTSSQDTAVTDSKRTADPKNAWQDAHPADPGSRPHLIRLFSRDAPGREDNTFKDRPSESDELQTIQEDSAATSESLDVMASQKRPSQRHGSKYLATASTMDHARHGFLPRHRDTGILDSIGRFFGGDRGAPKRGSGKVPWLKPGRSPLPSHARSQPGLCNMYKDSHHPARTAHYGSLPQKSHGRTQDENPVVHFFKNIVTPRTPPPSQGKGAEGQRPGFGYGGRASDYKSAHKGFKGVDAQGTLSKIFKLGGRDSRSGSPMARR

SEQ ID NO: 13009 - protein, 216 aa, Homo sapiens
  DOMAIN (150)..(193): Myelin basic protein domain identified by eMATRIX, accession number BL00569A, p-value=1.000e-40, raw score of 16.70
MGNHAGKRELNAEKASTNSETNRGESEKKRNLGELSRTTSEDNEVFGEADANQNNGTSSQDTAVTDSKRTADPKNAWQDAHPADPGSRPHLIRLFSRDAPGREDNTFKDRPSESDELQTIQEDSAATSESLDVMASQKRPSQRHGSKYLATASTMDHARHGFLPRHRDTGILDSIGRFFGGDRGAPKRGSGKRLTPPGKNCSLRVPAPEVTRPDPR

SEQ ID NO: 13010 - protein, 68 aa, Homo sapiens
YEMLSDPVKRRAFNSVDPTFDNSVPSKSEAKDNFFEVFTPVFERNSRYNFDSWREFSYLDEEEKEKAE

SEQ ID NO: 13011 - protein, 107 aa, Homo sapiens
APSARDVSRCAHRARPGAIMLLLPSAADGRGTAITHALTSELEDKKELSEESEDEELQLEEFPMLKTLDPKDWKNQDHYAVLGLGHVRYKATQRQIKAARKYLVILK

SEQ ID NO: 13012 - protein, 587 aa, Homo sapiens
  DOMAIN (157)..(178): Nt-dnaJ domain proteins domain identified by eMATRIX, accession number BL00636B, p-value=8.333e-13, raw score of 15.11
  DOMAIN (418)..(567): Myb-like DNA-binding domain identified by PFam, accession name myb_DNA-binding, E-value=8.5e-18, PFam score of 72.6
APSARDVSRCAHRARPGAIMLLLPSAADGRGTAITHALTSASTLCQVEPVGRWFEAFVKRRNRNASASFQELEDKKELSEESQDEELQLEEFAMLKTLDPRDWKNQDHYAVLGLGHVRYKATQRQIKAAHKAMVLKHHPDKRKAAGEPIKEGDNDYFTCITKAYEMLSDPVKRRAFNSVDPTFDNSVPSKSEAKDNFFEVFTPVFERNSRWSNKKNVPKLGDMNSSFEDVDIFYSFWYNFDSWREFSYLDEEEKEKAECRDERRWIEKQNGATRAQRKKEEMNRIRTLVDNAYSCDPRIKKFKEEEKAKKEAEKKAKAEAKRKEQEAKEKQRQAELEAARLAKEKEEEEVRQQALLAKKEKDIQKKAIKKERQKLRNSCKIEEINEQIRKEKEEAEARMRQASKNTEKSTGGGGNGSKNWSEDDLQLLIKAVNLFPARTNSRWEVIANYMNIHSSSGVKRTAKDVIGKAKSLQKLDPHQKDDINKKAFDKFKKEHGVVPQADNATPSERFEGPYTDFTPWTTEEQKLLEQALKTYPVNTPERWEKIAEAVPGRTKKDCMKRYKELVEMVKAKKAAQEQVLNASRAKK

SEQ ID NO: 13013 - protein, 635 aa, Homo sapiens
  DOMAIN (152)..(173): Nt-dnaJ domain proteins domain identified by eMATRIX, accession number BL00636B, p-value=8.333e-13, raw score of 15.11
  DOMAIN (467)..(616): Myb-like DNA-binding domain identified by PFam, accession name myb_DNA-binding, E-value=1.1e-17, PFam score of 72.2
DVSRCAHRARPGAIMLLLPSAADGRGTAITHALTSASTLCQVEPVGRWFEAFVKRRNRNASASFQELEDKKELSEESEDEELQLEEFPMLKTLDPKDWKNQDHYAVLGLGHVRYKATQRQIKAAHKAMVLKHHPDKRKAAGEPIKEGDNDYFTCITKAYEMLSDPVKRRAFNSVDPTFDNSVPSKSEAKDNFFEVFTPVFERNSRWSNKKNVPKLGDMNSSFEDVDIFYSFWYNFDSWREFSYLDEEEKEKAECRDERRWIEKQNRATRAQRKKEEMNRIRTLVDNAYSCDPRIKKFKEEEKAKKEAEKKAKAEAKRKEQEAKEKQRQAELEAARLAKEKEEEEVRQQALLAKKEKDIQKKAIKKERQKLRNSCKTWNHFSDNEAERVKMMEEVEKLCDRLELASLQCLNETLTSCTKEVGKAALEKQIEEINEQIRKEKEEAEARMRQASKNTEKSTGGGGNGSKNWSEDDLQLLIKAVNLFPAGTNSRWEVIANYMNIHSSSGVKRTAKDVIGKAKSLQKLDPHQKDDINKKAFDKFKKEHGVVPQADNATPSERFEGPYTDFTPWTTEEQKLLEQALKTYPVNTPERWEKIAEAVPGRTKKDCMKRYKELVEMVKAKKAAQEQVLNASRAKK

SEQ ID NO: 13014 - protein, 139 aa, Homo sapiens
TNTGGWGPRHHAFVQHTLELLSLLCLNCGFLVYPFFLSWTVMYGSVNLVNLLKYGFQGIVVFYYCVIKKLKKIWILCLPRPRVPWLPTSDPSLRSPSSMVLNQICRVYSATKRGSVTGSWAYPCVLSRGMMSELCKSRA

SEQ ID NO: 13015 - protein, 76 aa, Homo sapiens
SFFETESCSVAHPGAQWCDISSLPPPPPGSSDCPASASRVAGITGTHHHAWPIFVFVVETGFHCLPQPPIVLGLQA

SEQ ID NO: 13016 - protein, 99 aa, Homo sapiens
RRRLALSPAGVHWHGLGSLQPPPPWFERFSCLGLLSGWDCRRAPPRPASFFVFLVETGFRHVGKDGLDFLTSGDPPALASQGAWIAGVSHRTRPQIHFF

SEQ ID NO: 13017 - protein, 21 aa, Homo sapiens
NIIIFLLEQINFGFWFFFEME

SEQ ID NO: 13018 - protein, 74 aa, Homo sapiens
HCNFPLPVQAILGSSNSRASASRVAGTTGALQHMQLIFCILVETGFHRVAQAGLDLLSLTIHPPRPPKVLGLQA

SEQ ID NO: 13019 - protein, 48 aa, Homo sapiens
LEIFFFFFSFTFFCRWGLTMFIRLVLNFWPQMILLPLPLPPKVLGLQA

SEQ ID NO: 13020 - protein, 64 aa, Homo sapiens
  DOMAIN (2)..(64): PDZ domain (Also known as DHR or GLGF) domain identified by PFam, accession name PDZ, E-value=0.0018, PFam score of 24.9
GGKDFNMPLTISRITPGSKAAQSQLSQGDLVVAIDGVNTDTMTHLEAQNKIKSASYNLSLTLQK

SEQ ID NO: 13021 - protein, 134 aa, Homo sapiens
  misc_feature (1)...(134): Xaa = X or * as defined in Table 2
CGGIPSQATIFTLSTLISSVTSLNSTSFSTKVHTLSQNLYVFREPLKLTLFLTLXASAAFIALSNXSRTXRASWGVICXDCMSSSRPPEDCFPKXYFCITDMPWLRRKNFFSTFQSKCRFXGTPICQKDKTSKK

SEQ ID NO: 13022 - protein, 734 aa, Homo sapiens
  DOMAIN (636)..(651): LIM domain proteins domain identified by eMATRIX, accession number BL00478B, p-value=4.250e-12, raw score of 14.79
  DOMAIN (558)..(734): LIM domain containing proteins domain identified by PFam, accession name LIM, E-value=1.4e-28, PFam score of 106.0
AAADSTSMSYSVTLTGPGPWGFRLQGGKDFNMPLTISRITPGSKAAQSQLSQGDLVVAIDGVNTDTMTHLEAQNKIKSASYNLSLTLQKSKRPIPISTTAPPVQTPLPVIPHQKDPALDTNGSLVAPSPSPEARASPGTPGTPELRPTFSPAFSRPSAFSSLAEASDPGPPRASLRAKTSPEGARDLLGPKALPGSSQPRQYNNPIGLYSAETLREMAQMYQMSLRGKASGVGLPGGSLPIKDLAVDSASPVYQAVIKSQNKPEDEADEWARRSSNLQSRSFRILAQMTGTEFMQDPDEEALRRSSTPIEHAPVCTSQATTPLLPASAQPPAAASPSAASPPLATAAAHTAIASASTTAPASSPADSPRPQASSYSPAVAASSAPATHTSYSEGPAAPAPKPRVVTTASIRPSVYQPVPASTYSPSPGANYSPTPYTPSPAPAYTPSPAPAYTPSPVPTYTPSPAPAYTPSPAPNYNPAPSVAYSGGPAEPASRPPWVTDDSFSQKFAPGKSTTSISKQTLPRGGPAYTPAGPQVPPLARGTVQRAERFPASSRTPLCGHCNNVIRGPFLVAMGRSWHPEEFTCAYCKTSLADVCFVEEQNNVYCERCYEQFFAPLCAKCNTKIMGEVMHALRQTWHTTCFVCAACKKPFGNSLFHMEDGEPYCEKDYINLFSTKCHCCHFPVEAGDKVIEALGHTWHDTCFICAVCHVNLEGQPFYSKKDRPLCKKHAHTINL

SEQ ID NO: 13023 - protein, 177 aa, Homo sapiens
RTRGGDVKTDLNNIEEFLEETLTPEKYPILAAKHREYNTEDIDIFYKFSAYIKNTKQQNNAALERGLTKALKKVDDYLNTPLPQERDAYTCGEDKGTRRKFLDGDELTLADCNLLPKLHVVKIVGKKYRNYHIPADMTGLWRYLKNAYARDEFTNTCAADSEIELAYADVAKRLSRS

SEQ ID NO: 13024 - protein, 217 aa, Homo sapiens
  DOMAIN (97)..(119): SPUMAVIRUS ASPARTIC PROTEASE (A9) SIGNATURE domain identified by eMATRIX, accession number PR00920E, p-value=5.826e-09, raw score of 13.24
WEGPTCSMCKVIGIHNACEEAPLHSVFHGQKTELNNCISMLVAANDRVHTIITQLEDSRRVTKENSHHVNRKLSQKFDTLYAILDEKKSELLLRISQEQEKKLIFIEALIQQYQEQLDKSTKLVETAIQSLDEPGGATFLLTAKQLIKSIVEASKGCQLGKTEQGFENMDFFTLDLEHIADALRAIDFGTDEEEEEFIEEEDQEEEESTEGKEEGHQ

SEQ ID NO: 13025 - protein, 120 aa, Homo sapiens
IKPEMEAGISVTLGLDRNTRVQVGCRELRSTKYISGWASCTSIQPSGRELVCVVGECLPLPVVPNWIGGGYGTKYWSRRSSQEWAVCSMDKTRYPEDSQLQCQDGSTRTYKITVSSLPAS

SEQ ID NO: 13026 - protein, 161 aa, Homo sapiens
  DOMAIN (41)..(55): VINCULIN SIGNATURE domain identified by eMATRIX, accession number PR00806B, p-value=9.640e-09, raw score of 4.28
LLWILIAAPPPPPPVIRNGARGCSPSPTTIPNAWGQEPPRPRERPPPPPSRDAAGATPSFLPPPLRNGHRDSIHHCSGLCLDDFESKYSFHPVEDFPAPEEYKHFSEDYPSKTNRAARGAPPLPPILQVKPGLVPFLIKRMDLLFFSYGPLHSSELLHDSS

SEQ ID NO: 13027 - protein, 45 aa, Homo sapiens
MQHVCAMRQVDIDAYTTCLYASGTTPVPQLPLLLMALLGLCTLVL

SEQ ID NO: 13028 - protein, 469 aa, Homo sapiens
APRMRLLAWLIFLANWGGARAEPGKFWHIADLHLDPDYKVSKDPFQVCQSAGSQPRGPTQAPWGDYLCDSPWALINSSIYAMKEIEPEPDFILWTGDDTPHVPDEKLGEAAVLEIVERLTKLIREVFPDTKVYAALGNHDFHPKNQFPAGSNNIYNQIAELWKPWLSNESIALFKKGAFYCEKLPGPSGAGRIVVLNTNLYYTSNALTADMADPGQQFQWLEDVLTDASKAGDMVYIVGHVPPGFFEKTQNKAWFREGFNEKYLKVVRKHHRVIAGQFFGHHHTDSFRMLYDYAGVSISAMFITPGVTPWRTTLPGVVNGANNPAIRVFEYDRATLSLKDMVTYFMNLSQANAQGTPRWELEYQLTEAHGVPHATAHSMHTVLGRIVGDKSTLQRYYVYNSVSYSAGVCDEACSMQHVCAMRQVDIDATTTCLYASGTTAVPQLPLLLMALLGLCTTRAVTCQAHHSSW

SEQ ID NO: 13029 - protein, 41 aa, Homo sapiens
  DOMAIN (12)..(35): Ribosomal protein L34e proteins domain identified by eMATRIX, accession number BL01145B, p-value=3.803e-12, raw score of 14.65
AYGDSMCAKCVSDRIKHAFFIKEQKIIVKVLKAQAGSQKAK

SEQ ID NO: 13030 - protein, 26 aa, Homo sapiens
MLFLKAIWGGSDSWSREAACPLNCNL

SEQ ID NO: 13031 - protein, 161 aa, Homo sapiens
  DOMAIN (131)..(154): Ribosomal protein L34e proteins domain identified by eMATRIX, accession number BL01145B, p-value=2.636e-20, raw score of 14.65
  DOMAIN (42)..(152): Ribosomal protein L34e domain identified by PFam, accession name Ribosomal_L34e, E-value=4.6e-18, PFam score of 73.5
  misc_feature (1)...(161): Xaa = X or * as defined in Table 2
AGVGVRGTTGRLVVRKFLTLIFGNPLFLVAPPKPHSEWSQRLTYRRRPSPYNTALXQKRRHRSHNQIPPRIVYLLYPRRLGKHPNSACGVCPRQEFEGVRAVRPKVLMRLSKTKKHVSRAYGGSNVCLNVFRDRIKRAFLIEEQKIVVKVLKAQAQSQKAK

SEQ ID NO: 13032 - protein, 73 aa, Homo sapiens
  misc_feature (1)...(73): Xaa = X or * as defined in Table 2
HRGYLLFNLFVEVISSEQSVLAPPVRRXTCIVANLRGVGDPDTSRHCAQGLGFKLLTLYSLLVGSESWGGARA

SEQ ID NO: 13033 - protein, 67 aa, Homo sapiens
  misc_feature (1)...(67): Xaa = X or * as defined in Table 2
LCTVCLWALKAGVGPEPERLIYSVPVFVXHAVCAGIADGGSFSSKVRCLEIIFFYTGISIKMFLYIK

SEQ ID NO: 13034 - protein, 34 aa, Homo sapiens; identical to SEQ ID NO: 11909
  misc_feature (1)...(34): Xaa = X or * as defined in Table 2

SEQ ID NO: 13035 - protein, 38 aa, Homo sapiens
  DOMAIN (1)..(33): Ribosomal protein S10p/S20e domain identified by PFam, accession name Ribosomal_S10, E-value=7.5e-13, PFam score of 55.8
MRIHKRLIDLHSPSEIVKQITSISIEPGVEVEVTIADA

SEQ ID NO: 13036 - protein, 41 aa, Homo sapiens
NKSSESLNPPVCLAEFVKRLRYCEYLGKYFCDCCHSYAESC

SEQ ID NO: 13037 - protein, 17 aa, Homo sapiens
MSPPKSKGPFPRFPGRF

SEQ ID NO: 13038 - protein, 17 aa, Homo sapiens
MSPPQSKGPFPKFPGRF

SEQ ID NO: 13039 - protein, 26 aa, Homo sapiens
RPRVRALKAGVGPEPERLIYSVPVFV

SEQ ID NO: 13040 - protein, 251 aa, Homo sapiens
  DOMAIN (75)..(106): Protein kinases ATP-binding region proteins domain identified by eMATRIX, accession number BL00107A, p-value=8.826e-14, raw score of 18.39
  DOMAIN (21)..(209): Eukaryotic protein kinase domain identified by PFam, accession name pkinase, E-value=3.3e-57, PFam score of 203.5
TVPLEVVLLRKVGAAGGARGVIRLLDWFERPDGFLLVLERPEPAQDLFDFITERGALDEPLARRFFAQVLAAVRHCHSCGVVHRDIKDENLLAVLRSGELKLIDFGSGALLMDTVYTDFDGTRVYSPPEWIRYHRYHGRSDTVWSLGVLLYDMVCGDIPFEQDEEILRGRLLFRERVSPECQQLIRWCLSLRPSERPSLDQIAAHPWMLGADGGAPEQDCDLRLCTLDPDDVASTTSSSETLLRSLHLTGS

SEQ ID NO: 13041 - protein, 140 aa, Homo sapiens
  DOMAIN (62)..(87): GLYCOSYL HYDROLASE FAMILY 47 SIGNATURE domain identified by eMATRIX, accession number PR00747G, p-value=9.667e-26, raw score of 14.50
  DOMAIN (1)..(139): Glycosyl hydrolase family 47 domain identified by PFam, accession name Glyco_hydro_47, E-value=0.042, PFam score of -224.3
IALGAEDAKEEKRAHYRELAAQITKTCHESYARSDTKLGPEAFWFNSGREAVATQLSESYYILRPEVVESYMYLWRQTHNPIYREWGWEVVLALEKYCRTEAGFSGIQDVYSSTPNHDNKQQSFFLAETLKDALPFQDLR

SEQ ID NO: 13042 - protein, 145 aa, Homo sapiens
  DOMAIN (64)..(82): GLYCOSYL HYDROLASE FAMILY 47 SIGNATURE domain identified by eMATRIX, accession number PR00747E, p-value=9.571e-19, raw score of 15.13
  DOMAIN (1)..(145): Glycosyl hydrolase family 47 domain identified by PFam, accession name Glyco_hydro_47, E-value=0.0013, PFam score of -188.8
ILAEFGSLHLEFLHLTELSGNQVFAEKVRNIRKVLRKIEKPFGLYPNFLSPVSGNWVQHHVSVGGLGDSFYEYLIKSWLMSGKTDMEAKNMYYEALETHKLGPEAFWFNSGREAVATQLSESYYILRPEVVESYMYLWRQTHNTK

SEQ ID NO: 13043 - protein, 279 aa, Homo sapiens
  DOMAIN (58)..(77): GLYCOSYL HYDROLASE FAMILY 47 SIGNATURE domain identified by eMATRIX, accession number PR00747C, p-value=3.250e-16, raw score of 12.06
MPLVMKAGENQRRQGDRGLSGATVIDSLDTLYLMELKEEFQEAKAWVGESFHLNVSGEASLFEVNIRYIGGLLSAFYLTGEENRKMTEGAEKASVFFRAYAQPSYLAVVSGDGLQEGRGEDTAQGSRGGLGMKLQRETPCWVGQSYREPVPMGVTRITTAAHVFRIKAIRLGEKLLPAFNTPTGIPKGVVSFKSGNWGWATAGSSSILAEFGSLHLEFLHLTELSGNQVFAEKASLLPTLLPAEQRDERAAATGFSEASGSSLMDQQEGSGEPGSPSYH

SEQ ID NO: 13044 - protein, 137 aa, Homo sapiens
  DOMAIN (27)..(52): GLYCOSYL HYDROLASE FAMILY 47 SIGNATURE domain identified by eMATRIX, accession number PR00747G, p-value=9.667e-26, raw score of 14.50
  DOMAIN (1)..(126): Glycosyl hydrolase family 47 domain identified by PFam, accession name Glyco_hydro_47, E-value=0.026, PFam score of -219.5
TKLGPEAFWFNSGREAVATQLSESYYILRPEVVESYMYLWRQTHNPIYREWGWEVVLALEKYCRTEAGFSGIQDVYSSTPNHDNKQQSFFLAETLKYLYLLFSEDDLLSLEDWVFNTEAHPLPVNHSDSSGRAGGRH

SEQ ID NO: 13045 - protein, 394 aa, Homo sapiens
  DOMAIN (279)..(304): GLYCOSYL HYDROLASE FAMILY 47 SIGNATURE domain identified by eMATRIX, accession number PR00747G, p-value=2.091e-24, raw score of 14.50
  DOMAIN (1)..(362): Glycosyl hydrolase family 47 domain identified by PFam, accession name Glyco_hydro_47, E-value=1.1e-87, PFam score of 304.7
ESFHLNVSGEASLFEVNIRYIGGLLSAFYLTGEEVFRIKAIRLGEKLLPAFNTPTGIPKGVVSFKSGNWGWATAGSSSILAEFGSLHLEFLHLTELSGNQVFAEKVRNIRKVPQVSFEKPFGLYPNFLSPVSGNWVQHHVSFGGLGDSFYEYLIKSWLMSAKTDLEAKNMYYGAPLEAIETYLLNVSPGGLTYIAEWRGGILDHKMGHLACFSGGMIALGAEDAKEEKRAHYRELAVQITKTCYESYARSDTKLGPEAFWFNSGREAVATQLSEEYTYILRPEVVESYMYLWRQTHNPSYREWGWEVVLALEKYCRTEAGFSGDSKTCYSRHPQPRTTSRQSFFLAETLNRCLVSACNGPDTGLEARDTAESETVISPAVKGSRGEKAMVRETD

SEQ ID NO: 13046 - protein, 519 aa, Homo sapiens
  DOMAIN (146)..(167): PROTEIN INTERGENIC REGION ABC1 PRECURSOR MITOCHONDRION T domain identified by eMATRIX, accession number PD01823C, p-value= 5.909e-14, raw score of 16.13
MIFVVIILMVVLSPEGGSGLDSSPFLSEANAERIVQTLCTVRGAALKPYPPTGPNFRYSHGVPPHLFAYFPPGSTVSQDNSFISPQLQHIFERVRQSADFMPRWQMLRVLEEELGRDWQAKVASLEEVPFAAASIGQVHQGLLRDGTEVAVKIQYPGIAQSIQSDVQNLLAVLKMSAALPAGLFAEQSLQALQQELAWECDYRREAACAQNFRQLLANDPFFRVPAVVKELCTTRVLGMELAGGVPLDQCQGLSQDLRNQICFQLLTLCLRELFEFRFMQTDPNWANFLYDASSHQVTLLDFGASREFGTEFTDHYIEVVKAAADGDRDCVLQKSRDLKFLTGFETKAFSDAHVEAVMILGEPFATQGPYDFGSGETARRIQDLIPVLLRHRLVSPPEGDLWPWHRKLAGAFLACAHLRDHIACRDHKPGHLPPLLGQSPARRSHCRQPPHQRGTPGWIPHDSLHGGFSPQSRPYPAVVPLIPSPSALGQRSPLGLPSLAWLSSLAPKTQESLGLGNSP

SEQ ID NO: 13047 - protein, 65 aa, Homo sapiens
VFSTRCGTHPPVCLAEFVKRLRYCEYLGKYFCDCCHSYAESCIPARILMMWDFKKYYVSNFSKTA

SEQ ID NO: 13048 - protein, 508 aa, Homo sapiens
  DOMAIN (20)..(493): Monocarboxylate transporter domain identified by PFam, accession name MCT, E-value=2.9e-140, PFam score of 479.4
  misc_feature (1)...(508): Xaa = X or * as defined in Table 2
MPQALERADGSWAWVVLLATMVTQGLTLGFPTCIGIFFTELQWEFQASNSETSWFPSILTAVLHMAGPLCSILVGRFGCRVTVMLGGVLASLGMVASSFSHNLSQLYFTAGFITGLGMCFSFQSSITVLGFYFVRRRVLANALASMGVSLGITLWPLLSRYLLENLGWRGTFLVFGGIFLHCCICGAIIRPVATSVAPETKECPPPPPETPALGCLAACGRTIQRHLAFDILRHNTGYCVYILGVMWSVLGFPLPQVFLVPYAMWHSVDEQQAALLISIIGFSNIFLRPLAGLMAGRPAFASHRKYLFSLALLLNGLTNLVCAASGDFWVLVGYCLAYSVSMSGIGALIFQVLMDIVPMDQFPRALGLFTVLDGLAFLISPPLAGLLLDATNNFXDVFQQCPSFFPXSKAPLLKGGSFPPPPQKKEQGKQAVAADALERDLFLEAKDGPGKQRSPEIMCQSSRQPRPAGVNKHLWGCPASSRTSHEWLFWPKAVLQAKQTALGWNSPT

SEQ ID NO: 13049 - protein, 110 aa, Homo sapiens
QTELGVRFPFTLPFLLGSARGCSGFRVLFVDFRVQPGFRKENLIQGDLFFMNRCQSSRQPRPAGVNKHLWGMSCPASRDPAMKWLLWPKAVLQAKQTALGWNSPYLECPV

SEQ ID NO: 13050 - protein, 97 aa, Homo sapiens
ESCSVTQAGVHWCNLGSLQPSPPDSSDSPSSVSRVAGITGMCHHAQLIFVFVVETGFHHGEAGLCLRLPKCWDYRCEPPRLHLGLQLNFTYKDRCLA

SEQ ID NO: 13051 - protein, 201 aa, Homo sapiens
  DOMAIN (71)..(124): Clathrin light chain proteins domain identified by eMATRIX, accession number BL00224B, p-value=8.527e-09, raw score of 16.94
KADSEQHGEAKRRYSSSLAKKEVSKAPEDKKKRLEDDKRKKEDKERKKKDEEKVKAEEESKKKEEEEKKKHQEEERKKQEEQAKRQQEKEAAAHMKEKEESIQLHQEAWERHHLKKELCSKNQNAPGSRPKENFFSRLDSSLKKNTAFVKKLKTIPEQQRDSLSHDFNGLNLSKYIAEAVASIVEAKLKISDVNCAVHLCS

SEQ ID NO: 13052 - protein, 205 aa, Homo sapiens
  DOMAIN (2)..(205): ATP synthase (C/AC39) subunit domain identified by PFam, accession name vATP-synt_AC39, E-value=2.2e-09, PFam score of 38.8
LDLDLFNAILIVTSLAPFFQDCMSENALHELNIELLRNKLYKSYLEAFYKFCKNHGDVTAEVMCPILEFEADRRAFIITLNSFGTELGQEDRETLYPNLGQLLSEGFALLAQAEDFDQMKNVADHYGVYKPLFEAVGGIGGKTLEDVFYEREVQMNVLAFNRQFHYGVFYAYVKLKEQEIRNIVWIAECISQRHRTKINSYIPIL

SEQ ID NO: 13053 - protein, 154 aa, Homo sapiens
  misc_feature (1)...(154): Xaa = X or * as defined in Table 2
GPRRLAAFLTSAGDGVYTRPVVFHDCTCATFHREDAYRLPFIPTNHHPTASPEXVPPHPHLGALQLPGDPSHDIHSIGTPNSNADAPKAGGCKWTQTRSVVPNSALGRKGSTHLPRIYTFTLALPETKLSNCPPKAPPIGLEHTSLAWALGTAD

SEQ ID NO: 13054 - protein, 57 aa, Homo sapiens
AQSRRRWEMEGRFGCRAERVSQRSPASPFWVWAGEYSSGWAGTVCVIAQQAPHLARP

SEQ ID NO: 13055 - protein, 41 aa, Homo sapiens
TGAWPSGPSHPAWPHGPAAAAGTTCLAQLLCLTGRQQTQCP

SEQ ID NO: 13056 - protein, 27 aa, Homo sapiens
VSCPGSNSPLGSSSASGASSLEFHHTA

SEQ ID NO: 13057 - protein, 71 aa, Homo sapiens
  misc_feature (1)...(71): Xaa = X or * as defined in Table 2
VSCPGSNSPLGSSSASGASSLNFLPSVPVRXSVSGLNLRVPAMARAVTISGDVTKAWVSGFASLRPVKFLL

SEQ ID NO: 13058 - protein, 284 aa, Homo sapiens
  DOMAIN (26)..(210): Transposase domain identified by PFam, accession name Transposase_18, E-value=3.1e-68, PFam score of 240.1
  misc_feature (1)...(284): Xaa = X or * as defined in Table 2
MKRSMTLTIFHSERIILRNRQPPPKESWEDIEDFGETHLDFLKQYGDFENGIPVHDTIARVVSCISPAKFHECFINWMRDCHSSNDKDVIAIDGKTLRHSYDKSRRRGAIHVISAFSTMHSLVIGQIKTDKKSNEITAIPELLNMLDIKGKIITTDAMVNCIVKVTGVFAINGDQRVAEPDSGALCQVRYPGNHRNDQRYLFRHSDSELLHWMVALDAAVKRVKCLWMSLHKVYSCIELPELPQPESAGHSGSQYAXCNRTRPHGQKPGTSAPGSSGVWRITSV

SEQ ID NO: 13059 - protein, 74 aa, Homo sapiens
  misc_feature (1)...(74): Xaa = X or * as defined in Table 2
AHTVHIRRSASRLPAGPASRLVDLSHXDLGHVPAGFFLIMNVQQEGLADLSTSAHLLGAPLVKGSRPHAWADAW

SEQ ID NO: 13060 - protein, 53 aa, Homo sapiens
GLVDESFVDTSPTGPSSADATTSVRAAKKRAPYTLVGSISEPGLGLISWWTSN

SEQ ID NO: 13061 - protein, 81 aa, Homo sapiens
TNSKNSCGKKSQNTGMVIAHTKALDPSQPVTFVTNVTYAADKGALYVDVIRVNSYYSWYRNYGHLELIQLQLATQFENWCK

SEQ ID NO: 13062 - protein, 383 aa, Homo sapiens
  DOMAIN (155)..(200): Glycosyl hydrolases family 2 proteins domain identified by eMATRIX, accession number BL00719C, p-value=1.923e-28, raw score of 30.44
  DOMAIN (1)..(382): Glycosyl hydrolases family 2 domain identified by PFam, accession name Glyco_hydro_2, E-value=1.8e-12, PFam score of -84.6
MHNSDGIEVMRQQKAEIGRVGGLEGIQLGVTEVIVNGARMLESYNCKAELGATGLVNYQISVKCSNQFKLEVYLLNAENKVVDNQAGTQGQLKVLGTNLWWPYLMHEHPAYLYSWEGRPDGAQAVGALTPGTLAVEVWLTAQKSLGPSDFYTLPVGLRTVAVTESQFLISGKPFYFHGVNKHEDADIQGKGFNWPLLVKDFNLLCWLGANTFCTSHYPYTEEMLQICYRYGIVVIDECPAPSGHTGPSVPSLLARWQLFNNVSMHHHMWVVEEPVLRDKNHPAMVMWSLAKEPASFLESAGYSFKSLTMEQTARVLDLDTGEAVLQYRSLPRGAHKTLGKKRKISSYNVDLTSCQLAKEKCLKGPSSFLQSRQERMNSELRDN

SEQ ID NO: 13063 - protein, 159 aa, Homo sapiens
  misc_feature (1)...(159): Xaa = X or * as defined in Table 2
CTNTPPTWTRGRMVIAHTKALDPSQPVTFVTNVTYAADKGALYVDVTPLNSYYSGYRNYGHLELIQLQLAAQFENWCKTSQSHYSERVWSGNALXGFHQDPPLMFQXRGPGKVLLEQYHLGLDQKRRKYVVGELIWNFADFMTNQCVSFLVGNENSANL

SEQ ID NO: 13064 - protein, 329 aa, Homo sapiens
  DOMAIN (1)..(319): Glycosyl hydrolases family 2 domain identified by PFam, accession name Glyco_hydro_2, E-value=0.083, PFam score of -332.7
ETSHQVMDRSNPVKPALDYFLNRLVNYQISVKCSNQFKLEVCLLNAENKVVDNQAGTQGQLKVLGANLWWPYLMHEHPASLYSWEGRPDGAQAVGALTPGALAVEVRLTAQKSLGPSDFYTLPVGLRTVPVTESQWALYVDVIRVNSYYSWYRNYGHLELIQLQLPAQFENWCKTSQSHYSERVWSGNAYRVSPGGGNLPHALPCCSQNLALPTFSPGTVVISLALSLIGLWAQETGVLFIVVSQDPPLMFSEEYQKSLLEQYHLGLDQKRRKYVVGELIWNFADFMTNQCKWQFSAWDNVPVLIFSGCLAHSGHFGCKNIGNKGGKLV

SEQ ID NO: 13065 - protein, 219 aa, Homo sapiens
MADFGISAGQFVAVVWDKSSPVEALKGLVDELQVKELQREPLTPEEIQSVREHLGHESDSLLFVQITGKKQNFEVGSSSQLKFSITKKSSPSVKPAVDPAAAKLWTLSANDMEDDSMDLIDSDELLDPEDLKKPDPASLQAASCGEGKKRKACKNCTCGLAKELEKEKSREQMSSQPKSACGNCYLGDAFRCASCPYLGMPAFKPGEKALLSNSNLHDA

SEQ ID NO: 13066 - protein, 177 aa, Homo sapiens
VCQYCTARMADFGISAGQFVAVVWDKSSPVEALKGLVDKLQALTGNEGRVSVENIKQLLQCLVPGSTTLHSAEILAEIARILRPGGCLFLKEPVETAVDNNSKVKTASKLCSALTLSGLVEVKELQREPLTPEEVQSVREHLGHESDNLLFVQITGKKPNFEVGSSMQLKLSITKKS

SEQ ID NO: 13067 - protein, 395 aa, Homo sapiens
  misc_feature (1)...(395): Xaa = X or * as defined in Table 2
ACQYCTARIVDFEISAGQFVAXVWDKSSPVEALKGLVDKLQAFTPGNEGRVSVENIKQLLQSAHKESSFDIILSGLVPGKAPLWHSAXDFWAGNPPGFLRPGWMFFFLKEPVETAVRXQXAKWKTASKLCSALTLSGLVEKLKELQREPLTPEEVQSVREHLGHESDNLLFVQITGKKPNFEVGSSRQLKLSITKKSSPSVKPAVDPAAAKLWTLSANDMEDDSMCIFCGCSLTHRWPLEHVVRLNMMINQKEDRVDTFFTLDSKFPLEACSHFSFSLAETTTVSLIALNTLQDLIDSDELLDPEDLKKPDPASLRAASCGEGKKRKACKNCTCGLAEELEKEKSREQMSSQPKSACGNCYLGDAFRCASCPYLGMPAFKPGEKVLLSDSNLHDA

SEQ ID NO: 13068 - protein, 246 aa, Homo sapiens
MGFRYVAQAGLELLSSDPSIPSSKTLQEQNDQSYPSTLPVFPEVALHTLLWGEDANNSKVKELQREPLTPEEIQSVREHLGHESDNLLFVQITGKKPNFEVGSSRQLKLSITKKSSPSVKPAVDPAAAKLWTLSANDMEDDSMDLIDSDELLDPEDLKKPDPASLRAASCGEGKKRKACKNCTCGLAEELEKEKSREQMSSQPKSACGNCYRGAMPSGCASCPYLGMPAFKPGEKVLLSDSNLHDA

SEQ ID NO: 13069 - protein, 62 aa, Homo sapiens
KDQDMRLRFWLLIWLLLGFISHQPTPVINSLAVYRHRETDFGVGVRDHPGPTWQNPISTKIG

SEQ ID NO: 13070 - protein, 50 aa, Homo sapiens
YRHMAPHPTNFLKKFFCRDGGLVMLPRLVFNSWPQGILLPQPPKVLGLQV

SEQ ID NO: 13071 - protein, 192 aa, Homo sapiens
  DOMAIN (18)..(31): 0 kw ZK63212 YDR313C ENDOSOMAL III. domain identified by eMATRIX, accession number DM01970B, p-value=2.612e-13, raw score of 8.60
  DOMAIN (1)..(51): FYVE zinc finger domain identified by PFam, accession name FYVE, E-value=3.1e-11, PFam score of 44.9
EKQSCKSCGETFNSITKRRHHCKLCGAVICGKCSEFKAENSRQSRVCRDCFLTQPVAPESTEKTPTADPQPSLLCGPLRLSKSGETWSEVWAAIPMSYPQVLHLQGGSQDGRLPRTIPLPSCKLSVPDPEERLDSGHVWKLQWAKQSWYLSASSAELQQQWLETLSTAAHGDTAQDSPGALQLQVPMGAAAP

SEQ ID NO: 13072 - protein, 100 aa, Homo sapiens
PCGARQGCGGPPPRLCSSRRTSQELLSKPVPPPAPGGPASRVGRGSVSGALSPEWNGERQHHRGVVLTHPQSPNHQAGSPNPNTRQALATLSVPNKPFIE

SEQ ID NO: 13073 - protein, 94 aa, Homo sapiens
ATESCSVAQVGVQWCDLSSLQAPPPGFTPFSSLSLQGSWDYRSPPPHPANFFVVLVEMASASQSAGITGVSHRTRPRIAIFNLTENTNGSVDED

SEQ ID NO: 13074 - protein, 112 aa, Homo sapiens
  DOMAIN (23)..(51): Dipeptidyl peptidase IV (DPP IV) N-terminal region domain identified by eMATRIX, accession number PF00930I, p-value=8.754e- 18, raw score of 15.96
  DOMAIN (2)..(11): Prolyl oligopeptidase family domain identified by PFam, accession name Peptidase_S9, E-value=0.032, PFam score of 11.3
GIHGWSYGGYLSLMALMQRSDIFRVAIAGAPVTLWIFYDTGYTERYMGHPDQNEQGYYLGSVAMQAEKFPSEIYPQERHSIRVPESGEHYELHLLHYLQENLGSRIAALKVI

SEQ ID NO: 13075 - protein, 400 aa, Homo sapiens
  DOMAIN (195)..(223): Dipeptidyl peptidase IV (DPP IV) N-terminal region domain identified by eMATRIX, accession number PF00930I, p-value=8.754e- 18, raw score of 15.96
  DOMAIN (111)..(183): Prolyl oligopeptidase family domain identified by PFam, accession name Peptidase_S9, E-value=1.6e-10, PFam score of 38.1
MKNPAISITENVLHFKAQGHGAKGDNVYEFHLEFLDLVKPEPVYKLTQRQVNITVQKKVSQWWERLTKQEKRPLFLAPDFDRWLDESDAEMELRAKVQLVNNRFKGVKYFRLNTLASLGYVVVVIDNRGSCHRGLKFEGAFKYKMGQIEIDDQVEGLQYLASRYDFIDLDRVGIHGWSYGGYLSLMALMQRSDIFRVAIAGAPVTLWIFYDTGYTERYMGHPDQNEQGYYLGSVAMQAEKFPSEPNRLLLLHGFLDENVHFAHTSILLSFLVRAGKPYDLQIAFCDNFAFYICLELANMEEDARSAGVATFVLQEEFDRYSGYWWCPKAETTPSGGKILRILYEENDESEVEIIHVTSPMLETRRADSFRYPKTGTANPKVTFKMSEIMIDAEGRGNFCK

SEQ ID NO: 13076 - protein, 195 aa, Homo sapiens
  DOMAIN (69)..(97): Dipeptidyl peptidase IV (DPP IV) N-terminal region domain identified by eMATRIX, accession number PF00930I, p-value=8.754e- 18, raw score of 15.96
  DOMAIN (2)..(58): Prolyl oligopeptidase family domain identified by PFam, accession name Peptidase_S9, E-value=7.5e-05, PFam score of 19.8
NRGSCHRGLKFEGAFKYKMGQIEIDDQVEGLQYLASRYDFIDLDRVGIHGWSYGGYLSLMALMQRSDIFRVAIAGAPVTLWIFYDTGYTERYMGHPDQNEQGYYLGSVAMQAEKFPSEPNRLLLLHGFLDENVHFAHTSILLSFLVRAGKQYDLQIYPQERHSIRVPESGEHYELHLLHYLQENLGSRIAALKVI

SEQ ID NO: 13077 - protein, 59 aa, Homo sapiens
KTLWMVNRTVLAGICSQQLSAGTATDVSKHRLQGFIPCRIPSASPQTQRKFSLQFHRNC

SEQ ID NO: 13078 - protein, 240 aa, Homo sapiens
  DOMAIN (132)..(168): CARCINOEMBRYONIC ANTIGEN PRECURSOR AMINO-TERMINAL DOMAIN domain identified by eMATRIX, accession number DM00372C, p-value= 4.919e-12, raw score of 23.69
  DOMAIN (159)..(208): Immunoglobulin domain identified by PFam, accession name ig, E-value=0.085, PFam score of 10.8
GACSRAGLWLLGQGLLGPRIYQLSEDCVSWSCHQPGLSPQSLIWARTELSSPDTQSGEDRKTSFVGHQPTALGGLGQSIESLMSSEAETEERRCTWMQLSETNRTLFLFGVTKYTAGPYECEIWNSGSASRSDPVTLNLLHGLDALTISSSYTYYHTGEVPKLSCLIDTHPLAEHSWLIGGKFQQSAQVFFIPQITKTYRGVYVCFIHNSATGGTNLIIKRIIVPDHSLRSALSLEVTGS

SEQ ID NO: 13079 - protein, 88 aa, Homo sapiens
FFLSEILSVSLTFSLFQLLLFQVINTLADHHHRGTDFGGSPWLHVIIAFPTSYKVVITLWIVYLWVSILTFCRGILVIANKNKLYKTI

SEQ ID NO: 13080 - protein, 99 aa, Homo sapiens
CMVFHDVSGACCCNGETTGKISGGGNQLGSSPIGGPNPSSGSSQTSISGDVVEACCSVLSMVCADPVYKVYVAALLLERELPGVFSGKIFNLLSDCLLW

SEQ ID NO: 13081 - protein, 553 aa, Homo sapiens
  DOMAIN (137)..(165): Tymovirus coat protein domain identified by eMATRIX, accession number PF00983C, p-value=8.121e-09, raw score of 13.62
MDDRPEERMIREKLKATCMPAWKHEWLERRNRRGPVPPNNKWSPPRIQIKHSRNPPPIYPFTLETKDWVSKNQIKQAAQQQTVQQQPLAGSRRNQESNFNLTHYGTQQIPPAYKDLAEPWIQVVATPYLMAINAASSLRTCNNHRPASISYLDSVRLLCHKRPSKSSVSALITVCSSFAGFMRPPYSLRATVHVSCSPLAALHSIAPSSVKVRVQACGTSASPQIRIMAFRYPGSRAIFPIIPCSAKPVRMSTCSWRATVIAMSLRLTEVLGQQNRYGSNNPYAHGANLCGELPLELYVFPIRPSFSTRPKTVAVDIASIFKIQQFPSHFTTPQLIDLVRFNSPVLLRVGALFHQCSISRSPLRRRSLSDATSSRARKAVLTRTFGLCYADLKNHLNATFVAVLKTGPLAAMQEQYRPEEIESKVQLHWDEKRTFEVTEDESKEKYYCLSMLPYPSGRLHMGHVRNYTIGDVIARYQRMLGKNVLQPIGWDAFGLPAEGAAVKNNTAPAPWTYDNIAYMKNQLKMLGFGYDWSRELATCTPEYYRWEQNSSPS

SEQ ID NO: 13082 - protein, 649 aa, Homo sapiens
  DOMAIN (537)..(553): Protein kinases ATP-binding region proteins domain identified by eMATRIX, accession number BL00107B, p-value=1.643e-11, raw score of 13.31
  DOMAIN (483)..(579): Eukaryotic protein kinase domain identified by PFam, accession name pkinase, E-value=5.7e-19, PFam score of 72.3
MALRRLSHDVSGALLLANGESTGNSGGSSGSSPSGGATSGSSQTSISGDVVEACCSVLSMVCADPVYKVYVAALQCMLLVTLEDPSSHFTRMRRRLMAYADEVEIAEAIQLGVEDTLDGQQDSFCRHLFPTTIWKPQRTVPLECTIHLEKTGKGLCATKLSASSEDISERLASISVGPSSSTTTTTTTEQPKPMVQTKGRPHSQCLNSSPLSHHSQLMFPALSTPSSSTPSVPAGTATDVSKHRLQGFIPCRIPSASPQTQRKFSLQFHRNCPENKDSDKLSPVFTQSRPLPSSNIHRPKPSRPTPGNTSKQGDPSKNSMTLDLNSSSKCDDSFGCSSNSSNCCYTSDETVFTPVEEKCRLDVNTELNSSIEDLLEASMPSSDTTVTFKSEVAVLSPEKAENDDTYKDDVNHNQKCKEKMEAEEEEALAIAMAMSASQDALPIVPQLQVENGEDIIIIQQDMTFFRHIIPPIQWIYKKESANLLIDSTGQRLRIADFGAAARLASKGTGAGEFQGQLLGTIAFMAPEVLRGQQYGRSCDVWSVGCAIIEMACAKPPWNAEKHSNHLALIFKKLLDFANTACDGDKESEVEDVETDSGNSPEDLRKEIMIGLQYQAEIPPYLGEYDGNEKDSPQPKKMTGVQNAKEVLST

SEQ ID NO: 13083 - protein, 1496 aa, Homo sapiens
  DOMAIN (1342)..(1361): TYROSINE KINASE CATALYTIC DOMAIN SIGNATURE domain identified by eMATRIX, accession number PR00109B, p-value=5.059e-12, raw score of 12.27
  DOMAIN (1226)..(1493): Eukaryotic protein kinase domain identified by PFam, accession name pkinase, E-value=6.3e-72, PFam score of 252.4
PSPEAGGGGGALKASSARAAAAGLLREAGSGGRERADWRRRQLRKVRSVELDQLPEQPLFLAASPPASSTSPSPEPADAAGSGTGFQPVAVPPPHGAASRRGAHLTESVAAPDSGASSPAAAEPGEKRAPAAEPSPAAAPAGREMENKETLKGLHKMDDRPEERMIREKLKATCMPAWKHEWLERRNRRGPVVVKPIPVKGDGSEMNHLAAESPGEVQASAASPASKGRRSPSPGNSPSGRTVKSESPGVRRKRVSPVPFQSGRITPPRRAPSPDGFSPYSPEETNRRVNKVMRARLYLLQQIGPNSFLIGGDSPDNKYRVFIGPQNCSCAHGTFCIHLLFVMLRVFQLEPSDPMLWRKTLKNFEVESLFQKYHSRRSSRIKAPSRNTIQKFVSRMSNSHTLSSSSTSTSSSENSIKDEEEQMCPICLLGMLDEESLTVCEDGCRNKLHHHCMSIWAEECRRNREPLICPLCRSKWRSHDFYSHELSSPVDSPSSLRAAQQQTVQQQPLAGSRRNQESNFNLTHYGTQQIPPAYKDLAEPWIQVFGMELVGCLFSRNWNVREMALRRLSHDVSGALLLANGESTGNSGGSSGSSPSGGATSGSSQTSISGDVVEACCSVLSMVCADPVYKVYVAALKTLRAMLVYTPCHSLAERIKLQRLLQPVVDTILVKCADANSRTSQLSISTLLELCKGQAGELAVGREILKAGSIGIGGVDYVLNCILGNQTESNNWQELLGRLCLIDRLLLEFPAEFYPHIVSTDVSQAEPVEIRYKKLLSLLTFALQSIDNSHSMVGKLSRRIYLSSARMVTTVPHVFSKLLEMLSVSSVSTHFTRMRRRLMAYADEVEIAEAIQLGVEDTLQRQQHNSFCRHLFPTTIWKPQRTVPLECTVHLEKTGKGLCATKLSASSEDISERLARISVGPSSSTTTTTTTTEQPKPMVQTKGRPHSQCLNSSPLSHHSQLMFPALSTPSSSTPSVPAGTATDVSKHRLQGFIPCRIPSASPQTQRKFSLQFHRNCPENKDSDKLSPVFTQSRPLPSSNIHRPKPSRPTPGNTSKQGDPSKNSMTLDLNSSSKCDDSFGLSSNSSNCCYTSDETVFTPVEEKCRLDVNTELNSSIEDLLEASMPSSDTTVTFKSEVAVLSPEKAENDDTYKDDVNHNQKCKEKMEAEEEEALAIAMAMSASQVALPIVPQLQVENGEDIIIIQQDTPETLPGHTKAKQPYREDTEWLKGQQIGLGAFSSCYQAQDVGTGTLMAVKQVTYVRNTSSEQEEVVEALREEIRMMSHLNHPNIIRMLGATCEKSNYNLFIEWMAGGSVAHLLSKYGAFKESVVINYTEQLLRGLSYLHENQIIHRDVKGANLLIDSTGQRLRIADFGAAARLASKGTGAGEFQGQLLGTIAFMAPEVLRGQQYGRSCDVWSVGCAIIEMACAKPPWNAEKHSNHLALIFKIASATTAPSIPSHLSPGLRDVALRCLRTSTFTDRPPSRELLKHPVFRTTW

SEQ ID NO: 13084 - protein, 40 aa, Homo sapiens
RPLKSQETTETWMKLETIILSKLSQRQKTKHRMFSLIGGN

SEQ ID NO: 13085 - protein, 35 aa, Homo sapiens
PKQHGTWMKLETIILSKLSQGQKTKHRMFSLIGGN

SEQ ID NO: 13086 - protein, 915 aa, Homo sapiens
  DOMAIN (272)..(317): kw TRANSCRIPTASE REVERSE II ORF2 domain identified by eMATRIX, accession number DM01354N, p-value=1.000e-40, raw score of 13.17
  DOMAIN (356)..(757): Reverse transcriptase domain identified by PFam, accession name rvt, E-value=2.2e-13, PFam score of 57.9
MGDFNTPLSTLDRSTRQKVNKDTQELNSALHQADLIDIYRTLHPKSTEYTFFSAPHHTYSKIDHIVGSKALLSKCKRTEIITNYLSDHSAIKLELRIKNLTQSHSTTWKLNNLLLNDYWVHNEMKSEIKMFFETNENKDTTYQNLWDAFKAVCRGKFIALNAHKRKQERSKIDTLTSQLKELEKQEQTHSKASRRQEITKIRAELKEIETQKTLQKINESRSWFFERINKIDRPLARLIKKKREKNQIDTIKNDKGDITTDPTEIQTTIREYYKHLYANKLENLEEMDKFLDTYTLPRLNQEEVESLNRPITGAEIVAIINSLPTKKSPGPDGFTAEFYQRYKEELVPFLLKLFQSIEKEGILPNSFYEASIILIPKPGRDTTKKENFRPISLMNTDAKILNKILANRIQQHIKKLIHHDQVGFIPGMQGWFNIRKSINVIQHINRTKDKNHMIISIDAEKAFDKIQQPFMLKTLNKLELEKTTLNFIWNQKRARIAKSILSQKNKAGGITLPDFKLYYKATVTKTAWYWYQNRDIDQWNRTEPSEITPHTYNCLIFDKPEKNKKWGKDSLFNKWCWENWLAICRKLKLDPFLTPYTKINSRWIKDLNVRPKTIKTLEENLGITIQDIGMGKDFMSKTPKAMATKDKIDKWDLIKLKSFCTAKETTIRVNRQPTTWEKIFATYSSDKGLISRIYNELNQIYKKKTNNPIKKWAKDMNRHFSKEDIYAAKKHMKKCSSSLAIREMQIKTTMRYHLTPVRMAIIKKSGNNRCWRGCGEIRTLLHCWWDCKLVQPLWKSVWRFLRDLELEIPFDPAIPLLGIYPNDYKSCCYKDTCTRMFIAALFTIAKTWNQPKCPTMIDWIKKMWHIYTMEYYAAIKNDEFMSFVGTWMKLEIIILSKLSQEQKTKHRIFSLIGGN

SEQ ID NO: 13087 - protein, 1099 aa, Homo sapiens
  DOMAIN (110)..(151): kw TRANSCRIPTASE REVERSE II ORF2 domain identified by eMATRIX, accession number DM01354I, p-value=1.000e-40, raw score of 15.55
  DOMAIN (356)..(597): Reverse transcriptase domain identified by PFam, accession name rvt, E-value=6.8e-65, PFam score of 229.0
MGDFNTPLSTLDRSTRQKVNKDTQELNSALHQADLIDIYRTLQPKSTEYTFFSAPHHTYSKIDHIVGSKALLSKCKRTEIITNYLSDHSAIKLELRIKNLTQSRSTTWKLNNLLLNDYWVHNEMKAEIKMFFETNENKDTTYQNLWDAFKAVCRGKFIALNAHKRKQERSKIDTLTSQLKELEKQEQTHSKASRRQEITKIRAELKEIETQKTLQKINESRSWFFERINKIDRPLARLIKKKREKNQIDTIKNDKGDITTDPTEIQTTIREYYKHLYANKLENLDEMDKFLHTYTLPRLNQEEVESLNGPITGAEIVAIIDSLPTKKSPGPDGFTAEFYQRYKEELVPFLLKLFQSIEKEGILPNSFYEASIILIPKLGRDTTKKENFRPLSLMNIDAKILNKILAKRIQQHIKKLIHHDQVGFIPGMQGWFNIRKSINVIQHINRGKDKNHMIISIDAEKAFDKIQQPFMLKTLNKLGIDGTYFKIIRAIYDKPTANIILNGQKLEAFPLKTGTRQGCPLSPLLFNIVLEVLARAIRQEKEIKLISNFSKVSGYKINVQKSQAFLYTNNRQTESQIMSQLPFTIASKRIKYLGIQLTRDVKDLFKENYKPLLKEIKEDTNKWKNIPCSWVGRINIMKMAILPKVIYRFNAIPIKLPMTFFTELEKTTFKFIWNQKRACITKSILSQKNKAGGITLPDFKLYYKATVTKTAWYWYQNRDIDQWNRTEPSEIMLHIYNYLIFDKPEKNKQWGKDSLFNKWCWENWLAICRKLKLDPFLTPYTKINSRWIKDLNVRPKTIKTLEENLGITIQDIGMGKDFMSKTPKAMATKAKIDKWDLIKLKSFCTAKETTIRVNRQPTKWEKIFATYSSDKGLISRIYNELKQIYKKKTNNPIKKWAKDMNRHFSKEDIYAAKKHMKKCSSSLAIREMQIKTTMRYHLTPVRMAIIKKSGNNRCWRGCGEIGTLLHCWWDCKLVQPLWKSVWRFLRDLELEIPFDPAIPLLGIYPKDYKSCCYKDTCTRMFIAALFTIAKTWNQPKCPTMIDWIKKMWHIYTMEYYAAIKNDEFMSFVGTWMKLEIIILSKLSQEQKTKHGIFSLIGGN

SEQ ID NO: 13088 - protein, 734 aa, Homo sapiens
  DOMAIN (149)..(194): kw TRANSCRIPTASE REVERSE II ORF2 domain identified by eMATRIX, accession number DM01354N, p-value=1.000e-40, raw score of 13.17
MKAEIKMLFETNENKDTTYQNLWDTFKAVCRGKFRTLNAHKRKQERSKIDTLTSQLKELEKQEQTHSKASRRQEITKIRAELKEIETQKTLQKINESRSWFFGRINKIDRPLARLIKKKREKNQIDAIKNDKGDITTDPTEIQTTIREYYKHLHANNLENLEEMDKFLDTYTLPRLNQEEVESLNRPITGSEIVAIINSLPTKKSPGPDGFTAKFYQRYKEELRIKYLGIQLTRDVKDLFKENYKPLLKEIKEDTNKWKNIPCSWVGRINIVKMAILPKVIYRFNGIPIKLPITFFTELEKTTLKFIWNQKRARVAKSILSQKNKAGGIMLPDFKLYYKATVTKTAWYWYQNRDIDQWNRTEPSEIMPHIYNYLIFDKPEKNKQWGKDSLFNKWCWENWLAICRKLKMDPFLTPYTKINSRWIKDLNVRPKTIKTLEENLGNTIQDIGMGKDFMSKTPKAMATKAKIDKWDLIKLKSFCTAKETTIGVNRQPTKWEKIFATYSSDKGLIFRIYNELKQIYKKKTNNPIKKWAKDMNRQFSKEDIYAAKRHMKKCSTSLAIREMQIKTTMRYHLTPVRTAIIKKSGNNRCWRGCGEIGTLLHCCWDCKLVQPLWKSVWRFLRDLELEIPFDPAIPLLGIYPKDYKSCCYKDTCTRMFTAALLTIAKTWNQPKCPTMIDWIKKMWHIYTMESYAAIKNDEFMSFVGTWMKLEIIILSKLSQGQKTKQRIFSLIDGN

SEQ ID NO: 13089 - protein, 956 aa, Homo sapiens
  DOMAIN (149)..(194): kw TRANSCRIPTASE REVERSE II ORF2 domain identified by eMATRIX, accession number DM01354N, p-value=1.000e-40, raw score of 13.17
  DOMAIN (198)..(472): Reverse transcriptase domain identified by PFam, accession name rvt, E-value=1.2e-65, PFam score of 231.5
MKAEIKVFFETNENKDTTYQNLWDTFKAVCRGKFIALNAHKRKQERSKIDTLTSQLKELEKQEQTHSKASRRQEITKIRAELKEIQTQKTLQKINESRSWFFERINKIDRSLARLIKKKREKNQIDTIKNDKGDITTDPTEIQTTIREYYKHLYANKLENLEEMDKFLDTYTLPRLNQEEVESLNRPITGAEIVAIINSLPTKKSPGPDGFTAEFYQSWAETQPKKENFRPISLMNIDAKILNKILAKRIQQHIKKLIHHDQVGFIPGMQGWFNIRKSINVTQHINRAKDKNHMIISIDAEKAFDKIQQPFMLKTLNKLGIDGTYFKIIRAIYDNPTANIILNGQKLEAFPLKTGTRQGCPLSPLLFNIVLEVLARAIRQEKEIKGIQLGKEEVKLSLFADNMIVYLENPIVSAQNLLKLISNFSKVSGYKINVQKSQAFLYTNNRQTESQIMSQLPFTIASKRIKYLGIQLTRDVKDLFKENYKPLLKEIKEDTNKWKNIPCSGGRKNQYRENGHTAQELEKTTLKFIWNQKRAHIAKSILNQKNKAGGITLPDFKLYYKATVTKTAWYWYQNRDIDQWNRTEPSEITQHIYSYLIFDKPEKNKQWGKDSLFNKWCWENWLAICRKLKLDPFLTPYTKINSRWIKDLNVRPKTIKTLEENLGITIQDIGMGKDFMSKTPKAMATKDKIDKWDLVKLKSFCTAKETTIRVNRQPTKWEKIFATYSSDKGLISRIYNELKQIYKKKTNNPIKKWAKDMNRHFSKEDIYAAKKHMKKCSSSLAIREMQIKTTMRYHLTPVRMAIIKKSGNNRCWRGCGETGTLLHCWWDCKLAQPLWKSVWRFLRDLELEIPFDPAIPLLGIYPNDYKSCCYKDTCTRMFIAALFTIAKTWNQPKCPTIIDWIKKMWHIYTMEYYAAIKNDEFVSFVGTWMKLEIIILSKLSQEQKTTHRIFSLIGGN

SEQ ID NO: 13090 - protein, 108 aa, Homo sapiens
FFLSEILSVSLTFFIISNYYYSQVINSLAVYRHRETDFGVGVRDHPGQPWQNPISHEKLDNLIIIIIGFLRRYTFNILFCTSCLCVSILTFCRGILVITNKNKLYKTK

SEQ ID NO: 13091 - protein, 1079 aa, Homo sapiens
  DOMAIN (149)..(194): kw TRANSCRIPTASE REVERSE II ORF2 domain identified by eMATRIX, accession number DM01354N, p-value=1.000e-40, raw score of 13.17
  DOMAIN (233)..(508): Reverse transcriptase domain identified by PFam, accession name rvt, E-value=1.9e-86, PFam score of 300.6
MKAEIKMFFETNENKDTTYQNLWDAFKAVCRGKFIALNAHKRKQERSKIDTLTSQLKELEKQEQTHSKASRRQEITKIRAELKEIETQKTLQKINESMSWFFERINKIDRLLARLIKKKREKNQIDAIKNDKGDITTNPTEIQTTIREYYKHLYANKLENLEEMDKFLDTYALPRLNQEEVESLNRPITGAEIVAIINSLPTKKSPGPVGFTAEFYQRYKEELVPFLLKLFQSIEKERILPNSFYEASIIVIPKPGRDTTKKENFRPISLMNIDAKILNKILANRIQQHIKKLIHHDQVGFIPGMQGWFNICKSVNVIQHINRTKDKNHMIISIDAEKAFDKIQQPFMLKTLNKLGIDGTYFKIIRAICDKPTANIILNGQKLEAFPLKTGTRQGCPLSPLLFNIVLEVLARAIRQEKEIKGIQLGKEEVKLSLFADDMIVYLENPIISAQNLLKLISNFSKVSGYKINVQKSQAFLYTNNRQTESQIMSELPFTIASKRIKYLGIQLTRDMKDLFKENYKPLLKEIKEDTNKWKNIAFSWVGRINIMKMAILPKVIYRFNAISIKLPMTFFAELEKTTLKFIWNQKRARITKSILSQKSKAGGITLPDFKLYYKATVTKTAWYWYQNRDIDQCNRTEPSEIMPHIYNYLIFDKPEKNKQWGKDSLFNKWCWENWLAICRKLKLDPFLTPYTKIHSRWIKDLNVRPKTIKTLEENLGITIQDIGMGKDFMSKTPKAMATKDKIDKWDLIKLKSFCTAKETTIRVNRQPTKWEKIFATYSSDKGLISRIYNELKQIYKKKTNNPIKKWAKDMNRHFSKEDIYAAKKHMKKCSSSLAIREMQIKTTVRYHLTPVRMAIIKKSGNNRCWRGCGEIGTLLHCWWDCKLVQPLWKSVWRFLRDLELEIPFDPAIPLLGIYPEDYKSCFYKDTCTRMFIAALFTIAKTWNQPKCPTMIDWIQKMWHIYTMEYYAAIKNDEFMSFVGIWIKLEIIILSKLSEEQKTKHCIFSLIGKRTFAGKLPVIKPSDLVRLIHYHENSMGETDPIIRLSPPSYALDTWGLLQLKILDGGLPVTSVPDGSKKNH

SEQ ID NO: 13092 - protein, 667 aa, Homo sapiens
  DOMAIN (268)..(308): kw TRANSCRIPTASE REVERSE II ORF2 domain identified by eMATRIX, accession number DM01354Y, p-value=1.000e-40, raw score of 10.69
MPHIQVMLMQEMDSHSLGKLCPYGFAEYSPTSSCFHGFVLSVCGSSRDKATQRVDALVRQVIVNGGIVLDQFAVHDRVALADLIDLLVDLSAMMLCGVPTTGDPFVAFALGHPDDFDHLILPKHLVDRYLLLEPLLGPVQLLSHSASVHLDLHQFCSDFSYGIQLTRDVKDLFKENYKPLLKEIKEDTNKWKNIPCSWVGRINIMKMAMLPKVIYRFNAIPIKLPMTFFTELEKTTLKFIWNQKRARIAKSSLSQKNKAGGITLPDFKLYYKATVTKTAWYWYQNRDIDQWNRTEPSEITPHIYNYLIFDKPEKNKQWGKDSLFNKWCWENWLAICRELKLDPFLTPYTKIHSRWIKDLNVRPKTIKTLEENLGLTIQDIGMGKDFMSETPKAMATKAKIDKWDLMKLKSFCTAKETTIRVNRQPTKWEKIFTTYSSDKGLISRIYKELKQIYKIKTNNPIKKWAKDTNRHFSKEDIYAAKKHMKKCSPSRAIREMQIKTAMRYHLTPVRMAIITKSGNNRCWRGCGEIGTLLHCWWECKLLQPLWKSVWQFLRDLELEIPFDPAIPLLGIYPKDYKSCCYKDTCTRMFIVALFTIAKTWNQPKCPTMIDWIKKMWHIYTMEYYAAIKNDEFMSFVGTRMKLEIIILSKLSQGQKAKHRIFSLIGGN

SEQ ID NO: 13093 - protein, 994 aa, Homo sapiens
  DOMAIN (87)..(133): kw TRANSCRIPTASE REVERSE II ORF2 domain identified by eMATRIX, accession number DM01354O, p-value=1.000e-40, raw score of 8.73
  DOMAIN (120)..(395): Reverse transcriptase domain identified by PFam, accession name rvt, E-value=1.4e-88, PFam score of 307.7
MVDIHKPYHPFTWLGVSVSPCGPVLRYSNFFLASSTVQVELLVCGGSSSGSSEQGFVTMRTELNQEEVESLNRPITGSEIVAIINSLPTKKSPGPDGLTAEFYQRYKEELVPFLLKLFQSIEKEGILPNSFYEASIILIPKPGRDTTKKENFRPISLMNIDAKILNKILANRIQQHIKKLIHHDQVGFIPGMQGWFNIRKSINVIQHINRAKDKNHMIISIDAEKAFDKIQQPFMLKTLNKLGIDGTYFKIIRAIYDKPTANIILNGQKLEAFPLKTGTRQGCPLSPLLFNIVLEVLARAIRQEKEIKGIQLGKEEVKLSLFADDMIVYLENPIISAQNLLKLISNFSKVSGYKINVQKSQAFLYTNNRQTESQIMSELPFTIASKRIKYLGIQLTRDVKDLFKENYKPLLKEIKEDTNKWKNIPCSWVGRINIVKMAILPKVIYRFNAIPIKLPMTFFTELEKTTLKFIWNQKRARIAKSILSQKNKAGGITLPDFKLYYKATVTKTAWYWYQNRDIDQWNRTEPPEIMPHIYNYLIFDKLEKNKQWGKDSLFNKWCWESWLAICRKLKLDPFLTPYTKINSRWIKDLNVRPKTIKTLEENLGITIQDIGMGKDFMSKTPKAMATKAKIDKWDLIKLKSFCTAKETTIRVNRQPTTWEKIFATYSSDKGLISRIYNELKQIYKKKTNNPIKKWAKDMNRHFSKEDIYAAKKHMKKCSSSLAIREMQIKTTMRYHLTPVRMAIIKKSGNNRCWRGCGEIGTLLHCWWDCKLVQPLWKSVWRFLRDLELEIPFDPAIPLLGIYPNDYKSCCYKDTCTRMFIAALFTIAKTWNQPKCPTMIDWIKKMWHIYTMEYYAAIKNDEFMSFVGTWMKLETIILSKLSQEQKTKHRIFSLIDRLDQRNFLLGSSGAFPLSHDLAERDQASGTGKASPHRQLNPSHPAQPSVDSGPLTANHNTASATFSLPCLWAKAPPAGHLEHGTFRVKSFLGHSPAINQ

SEQ ID NO: 13094 - protein, 699 aa, Homo sapiens
  DOMAIN (115)..(162): kw TRANSCRIPTASE REVERSE II ORF2 domain identified by eMATRIX, accession number DM01354V, p-value=1.000e-40, raw score of 12.97
VHCRFWILALCQMSRLQKSPLLFNIVLEVLAKAIKQEKEIKGIQLGKEEVKLSLFADDMIVYLENPTVSAQNLLKLMSNFSKVSGYKINVQKSQAFLYTNNRQTESQIMSGLPFTITSKRITYLGIQLTRDVKDLFKENYKPLLKEIKEDTNKWKNIPCSWVGGRINLVKMAILPKVIYRFNAIPIKLPMTFFTELEKTTLKFIWNQKRALIAKSSLSQKNKTGGITLPDFKLYYKATVTKTSWYWYQNRDIDQWNRTEPSEIMPHIYNYLIFDKPDKNKQWGKDSLFNKWCWENWLAICRKLKLDPFLTPYTKINSRWIKDLHVRPKTIKTLEENLGNTIQDIGMGKDFMSKTPKAMATKAKIDKWDLIKLKSFCTAKETTIRVNRQPTEWEKIFATYSSDKGLISRIYNELKQIYKKKTNNPIKKWAKDMNRHFSEEDIYAAKKHMKKCSSSLAIREMQIKTTMRYHLTPVRMVIIKKSGNNRCWRGCGEIGTLLHCWWDCKLVQPLWKSVWQFLRDLELEIPFDPAIPLLGIYPEDYKPCCYKDTCTRMFIAALFTIAKTWNQPKCPTMIDGIKKMWHIYTMEYYAAIKKDEFMSFAGTWMKLETIILRKLSQGQKTKHRMYSLIGGNLTMRTFGHSAGSHHTPGPIMRCGAGGGIALGEIPNVNDELMGTANQHGTCIPMQQNCTLCTCTLKLKV

SEQ ID NO: 13095 - protein, 991 aa, Homo sapiens
  DOMAIN (126)..(171): kw TRANSCRIPTASE REVERSE II ORF2 domain identified by eMATRIX, accession number DM01354N, p-value=1.000e-40, raw score of 13.17
  DOMAIN (210)..(485): Reverse transcriptase domain identified by PFam, accession name rvt, E-value=7.3e-82, PFam score of 285.4
DAFKAVCRGKFIALNAHKRKQERSKIDTLTSQLKELEKQEQTHSKASRRQEITKIRAELKEIETQKTLQKINESRSWFFERINKIDRPLARLIKKKREKNQIDTIKNDKGDITTDPTEIQTTIREYYKHLYANKLENLEEMDTFLDTYTLPRLNQEEVESLNRPITGAEIVAIINSLSTKKSPGPDGFTAEFYQRYKEELVPFFLKLFQSIEKEGILPNSFYEASIILIPKPGRDTTKKENFRPISLMNIDAKILNKILANQIQQHIKKLIHHDQVGFIPGMQGWFNIRKSINVIQHINRAKDKNHMIVSIDAEKAFDKIQQPFMLKTINKIGIDGMYFKIIRAIYDKTTANIILNGQKLEAFPLKTGTRQGCPLSPLLFNIVLEFLARAIRQEKEIKGIQLGKEEVKLSLFADDMIVDLENPIVSAQNLLKLISNFSKVSGYKINVQKSQAFLYTNNRQTESQIMSELPFTIASKRIKYLGIQLTRDVKDLFKENYKPLLKEIKEDTKKWKNIPCSWVGRINIVKMAILPKVIYRFNAIPIKLPMTFFTELEKTTLKFIWNQKRARITKSILSQKNKAGGITLPDFKLYYKATVTKTAWYWYQNRDIDQWNRTEPSEITPHIYNYLIFDKPDKNNKKNKQRGKDSLFNKWCWENWLAICRKLKLDPFLTPYTKINSRWIKDLNVRPKTIKTLEENLGNTIQAIGMGKDFMNKTPKAMVTKAKIDKWDLTKLKSFCTAKETTIRVNRQPTEWEKIFTIYPSDKGLISGIYNELKQIYKKKTNNPIKKWVKDMNRHFSKEDIYAAKKHMKKCSSSLAIREMQIKTTMRYHLTPVRMAIIKKSGNNRCWRGCGEIGTLLHCWWDCKLVQPLWKSVWRFLRDLELEIPFDPAIPLLGVYPKDYKSCCYKDTCTRMFIAALFTIAKTWNQPKCPTMIDWIKKMWHIYTMEYYAAIKKDEFTSFVGTWMKLETIILSKLFQRRKTKHCMFSLIGGN

SEQ ID NO: 13096 - protein, 65 aa, Homo sapiens
  DOMAIN (22)..(65): Eukaryotic protein kinase domain identified by PFam, accession name pkinase, E-value=0.0013, PFam score of 17.0
LVVKTFFHQKKIFGLTSYSGMFVGTWNGNTKVAIKTLKPGTMSPESFLEEAQIMKKLKHDKLVQL

SEQ ID NO: 13097 - protein, 210 aa, Homo sapiens
  DOMAIN (182)..(203): Src homology 2 (SH2) domain proteins profile domain identified by eMATRIX, accession number BL50001B, p-value=5.846e- 16, raw score of 17.40
  DOMAIN (76)..(210): Eukaryotic protein kinase domain identified by PFam, accession name pkinase, E-value=4.1e-38, PFam score of 140.1
KGDHVKHYKIRKLDNGGYYITTRAQFETLQQLVQHYSERAAGLCCRLVVPCHKGMPRLTDLSVKTKDVWEIPRESLQLIKRLGNGQFGEVWNGTWNGNTKVAIKTLKPGTMSPESFLEEAQIMKKLKHDKLVQLYAVVSEEPIYIVTEYMNKGSLLDFLKDGEGRALKLPNLVDMAAQVAAGMAYIERMNYIHRDLRSANILVGNGLICK

SEQ ID NO: 13098 - protein, 841 aa, Homo sapiens
  DOMAIN (317)..(348): Protein kinases ATP-binding region proteins domain identified by eMATRIX, accession number BL00107A, p-value=8.000e-19, raw score of 18.39
  DOMAIN (284)..(613): Eukaryotic protein kinase domain identified by PFam, accession name pkinase, E-value=3.4e-30, PFam score of 112.8
MHWKRPWQVGGYLTLAATDTVQMLNYMSVRQLSYLNFPNTWQFLSWSQMPTQQAYPCVTHTHTPPVLGQMACCISNQRRTAALIGTGRPERNVHVNLRQGFVVNAHEPWVNEKVARQEPEDAGRGAVNRAWGFSPRLIHWSEGPQAAALGDRDPRWLPYHHAAALSGSHAAALSLAPSRSSALAVLIALLPAAQLHHHVPRSKACDIAYVGGHRRQVWYGQEDGQQILVVPVLLSTTQQKVSALWADRLERALLARSLAARLAPPSVHPCWVVTFPSAVAWINAGSLLDFLKDGEGRALKLPNLVDMAAQVAAGMAYIERMNYIHRDLRSANILMGNGLICKIADFGLARLIEDNEYTARQDPTRSRGHRSSAMNPYGSRAGRGRVESGLTLQMAATQVTVQWSAHLVSGEAVAWNTFPTANQDRKELAALSCSCPSTLCFMLLGLYPTLDHLQVRQSHCLTVSCAWQGLKPLFLWLAINKAEEICLTLLKYWQADCELLASAYQHAWHTCARTQSSNLSIADIESLELVVKTFFHQKKIFGLTSYSGMFVGTWNGNTKVAIKTLKPGTMSPESFLEEAQIMKKLKHDKLVQLYAVVSEEPIYIVTEYMNKGGDEGTIREEIGQVKAPRRDNIPKPSAAHAAQLVMWHEVRLTRALCPFWGWLDSWHHFCVELHPTHPLITQKPKGKELTDVVHRSQFSGAQSRVESIWIQRSMTKTPGAKLQKQAYQGVSNPHHHHHTGQQLKAVPHPLMEAPDAIDGYRKILVNFTKIYSAFAVTNSDYEWQPTLVAIGYRCGDPQGTERRTQKPPTEVVTTQLQPQPWLLRGHVGLVLLDHPIFKEKP

SEQ ID NO: 13099 - protein, 310 aa, Homo sapiens
SNESNAVALSTVERTARRDAPQHGTQPRGLPRSSEPHPAQRTAATGKARQRRKTTASAGAREGRRRLAGTTSIPGPFSAVPVHRHRPQEPRQGPRTPRRAEEKRDQMASHVECRPLGVFECELCTLTAPYSYVGQKPPNTQSMVLLEESYVMKDPFTSDKDRFLVLGSCCSLCSRLVCVGPVGRMEVEQHGFHSVPSVLRVTPESEKSLSICHRLTHTKGSCINSQGDEMGQGGRSLRSVAWEYLRLMEELVVQEKLGKEDCKGNSARLGEKESSIKEDPQPARFSDGPGLSECCSDVTERDDLLQQGSS

SEQ ID NO: 13100 - protein, 132 aa, Homo sapiens
RSRGTRAAMASHVECRPLGVFECELCTLTAPYSYVGQKPPNTQSMVLLEESYVMKDPFTSDKDRFLVLGSCCSLCSRLVCVGPVGCSLFYSKRFCLPCVRENINAFPQEIRQDLEKRKAPSKRTPSQPGSRT

SEQ ID NO: 13101 - protein, 469 aa, Homo sapiens
TAPPPSPPSPSSLLSPCNGVHHVSTQPSCPGRGKMSKLLNPEEMTSRDYYFDSYAHFGIHEEMLKDEVRTLTYRNSMYHNKHVFKDKVVLGVGSGTGILSMFAAKAGAKKVFGIECSSISDYSEKIIKANHLDNIITIFKGKVEEVELPVEKVDIIISEWMGYCLFYESMLNTVIFARDKWLKPGGLMFPDRAALYVVAIEDRQYKDFKIHWWENVYGFDMTCIRDVAMKEPLVDIVDPKQVVTNACLIKVWTLIRGGPGCAGSPAVPPWSPGNAGSCTAPTWARAKVVRLRYEPEVRLEGHATLVTEGTKKERYQGPWKEPGAWLIGPEKVMEKSVLTPNVILDASYCWELAYQKIGEGVVWFIYITGGPDKTQIAVLVQQEVDIYTVKTEELSFTSAFCLQIQRNDYVHALVTYFNIEFTKCHKKMGFSTAMEEPCIPIFVLSKEKVNNVVVVTAQVESVLDEGEAG

SEQ ID NO: 13102 - protein, 171 aa, Homo sapiens
NIILRNSIITSRKIKYTTLSTTHSIFLFPQISPQMSLIGFFYESEANKGSHFPFGYVSCLNLAETTSLFYYICFLKSPDQGQNAQTMAYNITPLRRAVECVQDQFGFINYEVGDSKKLFFHMKEVSRDGQCSAWNVWPSLLRGPKAVAAPRPDRLVSRLKNITLDDASDPR

SEQ ID NO: 13103 - protein, 447 aa, Homo sapiens
  DOMAIN (130)..(226): 'Cold-shock' DNA-binding domain identified by PFam, accession name CSD, E-value=4.9e-23, PFam score of 86.9
EMVLVSSSVWIVMFVCSSTSVKFWMGTSSHIADEVEFTVVPDMLSAQRNHAIRIKKLPKGTVSFHSHSDHRFLGTVEKEATFSNPKTTSPNKGKEKEAEDGIIAYDDCGVKLTIAFQAKDVEGSTSPQIGDKVEFSISDKQRPGQQVATCVRLLGRNSNSKRLLGYVATLKDNFGFIETANHDKEIFFHYSEFSGDVDSLELGDMVEYSLSKGKGNKVSAEKVNKTHSVNGITEEADPTIYSGKVIRPLRSVDPTQTEYQGMIEIVEEGDMKGEVYPFGIVGMANKGDCLQKGESVKFQLCVLGQNAQTMAYNITPLRRATVECVKDQFGFINYEVGDSKKLFFHVKKVQDGIELQAGDEVEFSVILNPAATGKVQAPCNVWRVCEGPPRLLQAPRPDRVGSIRLKNITLDDASAPRLMVLRQPKGDQITSMGFGAERKIRQAGVID

SEQ ID NO: 13104 - protein, 61 aa, Homo sapiens
GVGQRVSGTGRTRAVSPHPWDGFPEWPGRLGAVASTANLLDDVEGHACGEAGGEIEAPTSL

SEQ ID NO: 13105 - protein, 88 aa, Homo sapiens
ALFRDKLKHMGKSTRRKLFELARAFSEKTKMRKSKRKHLLKHQSRLGAAASTANLLDDVEGHACDENFRGQASRRAPQGGGRPCREGQ

SEQ ID NO: 13106 - protein, 88 aa, Homo sapiens
FFFFFLTDILLFCLFLRWSFTVTQAGVQWSDLGSLQPPPPRLKQFSCLSLLSSWDHKCLAPRPANFCSFSKDGVSPCWPGWSQTPHLR

SEQ ID NO: 13107 - protein, 109 aa, Homo sapiens
  misc_feature (1)...(109): Xaa = X or * as defined in Table 2
MGTSSGSWPRWSVTAMPPTSMRPCSRRSSSCWPCIPRLPASTAPXSMRPHSGPRMTTRSCLKTRSYADGYSPPLNVAQRYVVAWXGTQEKVMPPGRLAIPQRHRAGQQR

SEQ ID NO: 13108 - protein, 40 aa, Homo sapiens
  misc_feature (1)...(40): Xaa = X or * as defined in Table 2
QETTWPDLETKWLPGXRPWMGMSSGFWARWSVTAMPPTSE

SEQ ID NO: 13109 - protein, 175 aa, Homo sapiens
KVVQTEERKKANQFDAPISIYEVHLGSWRRHTDNNFWLSYRELADQLVPYAKWMGFTHLELLHINEHPFDGSWGYQPTGLYAPTRRFGTRDDFRYFIDAAHAAGLNVILDWVPGHFPTDDFALAEFDGTNLYEHSDSRESYHQDWNTLIYNYGRREVSYFLVGNALYWMNRFGID

SEQ ID NO: 13110 - protein, 903 aa, Homo sapiens
MGLDDGVARNLGLALSLARLADAVAGDVISALLVNAVGIIGLIGLFATAVAKIVGERWFARRHFFDIAPWMEEIAIKKRGMKLMRHFTGDRRFAAARYAHQDVNVVIMVSRAQSGAPTIQELKMLRVTVIGNIVQPDNIRSNIHPCLKCISIRHEYAPAGVQRQYCPSAHAASARSQVVAPSPDQCHDRGNRQSPYRQELLTPDADIQTPRRPPGHHSYRTRHPAADIPAAPGESVQYRKKQTELHTGIFNVVTIRQFLLGFRLVKRVTVTYRHARDGKARKQHRVNRQTCHHQEEQNPDVQVGNHPTRTDWHNRKGQQQRGKGNHRCQGKDDAIREFRDPVFFKEHFDHVRNQLERTAPANTVRSVTVLEQTQQATFAKAHECPAGDNHQQDHHRFEDDPQDARQPAPEHADISSEATCLAAGLGEFTGAGRDMGGLGFWYKWNLGWMHDTLDYMKLDPVYRQYHHDKLTFGILYNYTENFVLPLSHDEVVHGKKSILDRMPGDAWQKFANLRAYYGWMWAFPGKKLLFMGNEFAQSREWNHDASLDWHLLEGGDNWHHGVQRLVRDLNLTYRHHKAMHELDFDPYGFEWLVVDDKERSVLIFVRRDKEGNEIIVASNFTPVPRHDYRFGINQPGKWREILNTDSMHYHGSNAGNGGTVHSDEIASHVRQHSLSLTLPPLATIWLGVNFTLFSAHAERVELCVFDANGQEHRYDLPGHSGDIWHGYLPDARPGLRYGYRVHGPWQPAEGHRFNPAKLLIDPCARQIDGEFKDNPLLHAGHNEPDYRDNAAIAPKCVVVVDHYDWEDDAPPRTPWGSTIIYEAHVKGLTNLHPEIPVEIRGTYKALGHPVMINYLIQLGITALELLPVAQFASEPRLQRMGLSNYWGYKAGGDVCAASGVCLL

SEQ ID NO: 13111 - protein, 283 aa, Homo sapiens
  misc_feature (1)...(283): Xaa = X or * as defined in Table 2
XQCFFLSADSRIAELLTELHQLSKQTQEERSRSEHNLVNIQKTHERMQTENKISPYYRTKLRGLYTTAKADAEAECNILRKALDMIAEIKSLLEERRSAAKIAGLYNDSEPPRKTMRRGVLMTLLQQSAMTLPLWIGKPGDKPSQPSSPLVLAASKALQVLLGFLLYNLPCLSHRHHPQFLSRLRLPLYSGDCISQECLNLVFLLADVWFGFLPSIYLVFLIILYEGLLGGAAYVNTFHNIALETSDEHREFAMAATCISDTLGISLSGLLALPLHDFLCQLS

SEQ ID NO: 13112 - protein, 117 aa, Homo sapiens
  DOMAIN (9)..(37): !!!! PROTEIN ALU SUBFAMILY WARNING ENTRY NUCLEAR PHOSPHO domain identified by eMATRIX, accession number PD02454B, p-value= 3.354e-18, raw score of 11.61
DLQGVNHLRPGVQDQPGQHGETLSLLKIQNNLARRGGGRLQSQLLRRLRQDNRLNPGGGGCSEPRSRHCTPAWVTEQDPISKQNKRQQANFLIWEDFPYIPQGTKLIFTAQKLPRCK

SEQ ID NO: 13113 - protein, 354 aa, Homo sapiens
GSWGYQPTGLYAPTRRGLNVILDWVQAHFPTDDFALAEFDGTNLYEHSDPREGYHQDWNTLIYNYGRREVSNFLVGNALYWIERFGIDALRVDAVASMIYRDYSRKEGEWIPNEFGGRENLEAIEFLRNTNRILGEQVSGAVTMAEESTDFPGVSRPQDMGGLGFWYKWNLGWMHDTLDYMKLDPVYRQYHHDKLTFGILYNYTENFVLPLSHDEVVHGKKSILDRMPGDAWQKFANLRAYYGWMWAFPGKKLLFMAAKIAGLYNDSEPPRKTMRRGVLMTLLQQSAMTLPLWIGKPGDKPPPLCGAIPASGDYVARPGDRLLARLKPLNGERAVDSLPEGGQVTAIATQQGMR

SEQ ID NO: 13114 - protein, 151 aa, Homo sapiens
FFVFLVEMGFHHVGQAGLELLNSSDLPSSASQSAGIYRCEPLCPAFFFFFSETESRSVAQAVVQWCDLSSLQPPPPHFKRFFCLSLLSSWDYRHVPPCLANFCIFVEAGFHHVGQAGHKLLISSDPPASVSQSAGITGMSHCIQPHSPVFS

SEQ ID NO: 13115 - protein, 113 aa, Homo sapiens
SANATTKTSETNHTSRPRLKNVDRSTAQQLAVTVGNVTVIITDFKEKTRSSSTSSSTVTSSAGSEQQNQSSSGVQRAPDKGLPPRSLPTPKGDMSAVNDEIFPEIATWNCEKL

SEQ ID NO: 13116 - protein, 305 aa, Homo sapiens
  DOMAIN (9)..(23): GTP-BINDING ELONGATION FACTOR SIGNATURE domain identified by eMATRIX, accession number PR00315A, p-value=4.923e-12, raw score of 11.81
  DOMAIN (5)..(261): Elongation factor Tu family domain identified by PFam, accession name GTP_EFTU, E-value=3e-48, PFam score of 165.3
MGKEKTHINIVVNGHIDSGKSTSTGHLIYKCGGINKRSIKKFEKKAAEMGKGSFKSFVCDSSWYIPGHRDFITNIFTGTSQADCAVLVVAAGVGEFEAALLLQDVYKIGGIGTVPDGQVETVALKPGVVITFAPVNTTTEVKSVKMHHEALSEAFSGDNVGFHVKNVSVKDIHCSNNAGNCKNDPPMEAAGFTAQVIILNHPGQDCHMAHIACKFAELKEKIDRSSGKKLEDGPKFLKSGDVAIIDMVPGKPMCVESFSDYPPLGCFAACDMRQTVALGVIKAADKKAAGAGKVTKYPQKAQKAK

SEQ ID NO: 13117 - protein, 253 aa, Homo sapiens; identical to SEQ ID NO: 8623
  DOMAIN (55)..(66): GTP-BINDING ELONGATION FACTOR SIGNATURE domain identified by eMATRIX, accession number PR00315C, p-value=3.625e-12, raw score of 13.85
  DOMAIN (33)..(208): Elongation factor Tu family domain identified by PFam, accession name GTP_EFTU, E-value=1.6e-33, PFam score of 115.6

SEQ ID NO: 13118 - protein, 225 aa, Homo sapiens
  DOMAIN (97)..(129): GTP-binding elongation factors proteins domain identified by eMATRIX, accession number BL00301B, p-value=5.500e-31, raw score of 20.09
  DOMAIN (12)..(179): Elongation factor Tu family domain identified by PFam, accession name GTP_EFTU, E-value=3.5e-80, PFam score of 272.9
KLPLKAKMGKEKTHINIVVIGHVDSGKSTTTGHLIYKCGGIDKRTIEKFEKEAAEMGKGSFKYAWVLDKLKAERERGITIDISLWKFETSKYYVTIIDAPGHRDFIKNMITGTSQADCAVLIVAAGVGEFEAVIFKNGQTREHALLAYTLGGKQLIVGVNKMDSTEPPYSQKKYEEIVNEVSTYIKKIGYNPDTRAFVPISGLNGDHMLEPRANMPWFKGWKSHP

SEQ ID NO: 13119 - protein, 231 aa, Homo sapiens
  DOMAIN (189)..(203): GTP-binding elongation factors proteins domain identified by eMATRIX, accession number BL00301C, p-value=8.200e-15, raw score of 11.73
  misc_feature (1)...(231): Xaa = X or * as defined in Table 2
QSEQPCALPSRESTKLGGIGTVSSAPMETGFSNPGMVVTFAPSPRXQRKVKSAKMHHEALSEALSGEQLGASNVKNVFCQGMFRPWQTVAGXPAKNDPTQWEASWLSLLQVIILNHPRPKXGAGPMPLYLDCHTAHIACKFAELKEKIDRRSGKKLEDGPKFLKSGDAAIVDMVPGKPMCVESFSDYPPLGRFAVRDMRQTVAVGVIKAVDKKAAGAGKVTKSAQKAQKAK

SEQ ID NO: 13120 - protein, 31 aa, Homo sapiens
VIEHLVSQDGLDFLNLVICPPRPPKVLGLQA

SEQ ID NO: 13121 - protein, 88 aa, Homo sapiens
EMESRSIARMECSGSISAHCKLRLPGSHHSPASVSRVAGTTGTCHHARLIFLYFLLETGFHCVSHDGLHLLNLVICPPRPPKVLGLQA

SEQ ID NO: 13122 - protein, 66 aa, Homo sapiens
PPTGPPKLPDPVHLPPFGPPPSAWALPGMSPPSPDPDRNKLRIIRILKNASLSYLQVEVFPYPKMP

SEQ ID NO: 13123 - protein, 102 aa, Homo sapiens
  misc_feature (1)...(102): Xaa = X or * as defined in Table 2
QAGVXXWDLGSLQPLPPRLKQFSCILNPGNLSKEFXSTKETKQNIFVGHIQSQTSKFAISLIQIHPINMRSGTKTFMMVXGNKQRSKFPIWTFKIFPDMLPS

SEQ ID NO: 13124 - protein, 46 aa, Homo sapiens
ESIQDYKHLCQDLSFCQLPPDPPPLTVPQTHNARDQWLQDAFHISL

SEQ ID NO: 13125 - protein, 142 aa, Homo sapiens
IHDELSRAARAPDGPRHAAGAANAGPAAGPRRPVNLDSALAALRKEMLSAVGLRQLDMSLLCQLWGLYESIQDYKHLCQDLSFCQDLSSSLHSDSSYPPDAGLSDDEEPPDASLPPDPPPLTVPQTHNARDQWLQDAFHISL

SEQ ID NO: 13126 - protein, 231 aa, Homo sapiens
  DOMAIN (109)..(129): TNF family proteins domain identified by eMATRIX, accession number BL00251B, p-value=7.882e-16, raw score of 11.40
  DOMAIN (74)..(230): TNF(Tumor Necrosis Factor) family domain identified by PFam, accession name TNF, E-value=6.6e-57, PFam score of 202.5
VSMGALGLEGRGGRLQGRGSLLLAVAGATSLVTLLLAVPITVLAVLALVPQDQGGLGFQKLPEEEPETDLSPGLPAAHLIGAPLKGQGLGWETTKEQAFLTSGTQFSDAEGLALPQDGLYYLYCLVGYRGRAPPGGGDPQGRSVTLRSSLYRAGGAYGPGTPELLLEGAETVTPVLDPARRQGYGPLWYTSVGFGGLVQLRRGERVYVNISHPDMVDFARGKTFFGAVMVG

SEQ ID NO: 13127 - protein, 244 aa, Homo sapiens
  DOMAIN (122)..(142): TNF family proteins domain identified by eMATRIX, accession number BL00251B, p-value=1.214e-14, raw score of 11.40
  DOMAIN (88)..(244): TNF(Tumor Necrosis Factor) family domain identified by PFam, accession name TNF, E-value=4.4e-32, PFam score of 119.4
MGALGLEGRGGRLQGRGSLLLAVAGATSLVTLLLAVPITVLAVLALVPQDQGGLVTETADPGAQAQQGLGFQKLPEEEPETDLIPGLPTAHLIGAPLKGHGLGWETTKEQAFLTSGTQVSDAEGLALPQDGLYYIYCLVGITGRAPPGGGDPQGRSVTLRSSLYRAGGAYGPGTPELLLEGAETATPVLDPARRQGFWPLWYTSVGFGGLVQLRRGERVYVNISHPDMVDFARGKTFFGAVMVG

SEQ ID NO: 13128 - protein, 195 aa, Homo sapiens
MGFLHVGQAGLKLLTSGHYQKKRMFSENEENVKRMKTSEQINENICVSLERQTAFLEQVPESFEHLPPLPEPPAPLPELVDKTRDTLPPQKPELKVKRVFRPNGIALTWNITKINPKCAPEEKYPLFLCHENSNNKLIWKKIGEIKALPLPMACTLSQFLASNRYYFTVQSKDIFGRYGPFCDIKSIPGFSENLT

SEQ ID NO: 13129 - protein, 164 aa, Homo sapiens
  DOMAIN (39)..(51): KH domain proteins family of RNA binding proteins domain identified by eMATRIX, accession number PF00013, p-value=6.538e-11, raw score of 5.78
  DOMAIN (29)..(79): KH domain identified by PFam, accession name KH-domain, E- value=0.0067, PFam score of 22.9
EDTGTFRIYESAGAVKKARGFLEFVEDFIQVSKNLIGKVIGKNGKVIQEIVDKSDMVPVRIEGDSENKLPREDKDDRDSRHQRDSRRCPGGRCRSVSGRRGRGGPRGGKSSISSVPKDPDSNPYSVLDNTESDQTADTDASKSHHSTNRHTRSRRRRTDEDAVL

SEQ ID NO: 13130 - protein, 687 aa, Homo sapiens
  DOMAIN (296)..(308): KH domain proteins family of RNA binding proteins domain identified by eMATRIX, accession number PF00013, p-value=6.538e-11, raw score of 5.78
  DOMAIN (222)..(331): KH domain identified by PFam, accession name KH-domain, E- value=2.5e-11, PFam score of 51.1
MAELTVEVRGSNGAFYKGFIKDVHEDSLTVVFENNWQPERQVPFNEVRLPPPPDIKKEISEGDEVEVYSRANDQEPCGWWLAKVRMMKGEFYVIEYAACDATYNEIVTFERLRPVNQNKTVKKNTFFKCTVDVPEDLREACANENAHKDFKKAVGACRIFYHPETTQLMILSASEATVKRVNILSDMHLRSIRTKLMLMSRNEEATKHLECTKQLAAAFHEEFVVREDLMGLAIGTHGSNIQQARKVPGVTAIELDEDTGTFRIYGESADAVKKARGFLEFVEDFIQVPRNLVGKVIGKNGKVIQEIVDKSGVVRVRIEGDNENKLPREDGMVPFVFVGTKESIGNVQVLLEYHIAYLKEVEQLRMERLQIDEQLRQIGMGFRPSSTRGPEKEKGYATDESTVSSVQGSRSYSGRGRGRRGPNYTSGYGTNSELSNPSETESERKDELSDWSLAGEDDRDSRHQRDSRRRPGGRGRSVSGGRGRGGPRGGKSSISSVQYRSNIHNCSTLKRIFLASDMNIVLKDPDSNPYSLLDNTESDQTADTDASESHHSTNRRRRSRRRRTDEDAVLMDGMTESDTASVNENGLDDSEKKPQRRNRSRRRRFRGQAEDRQPAIDFIYKEVEKVVSLWQAKDVIEEHGPSEKAINGPTSASGDDISKLQRTPGEEKINTLKEENTQEAAVLNGVS

SEQ ID NO: 13131 - protein, 623 aa, Homo sapiens
  DOMAIN (296)..(308): KH domain proteins family of RNA binding proteins domain identified by eMATRIX, accession number PF00013, p-value=6.538e-11, raw score of 5.78
  DOMAIN (222)..(331): KH domain identified by PFam, accession name KH-domain, E- value=2.5e-11, PFam score of 51.1
MADVTVEVRGSNGAFYKGFIKDVHEDSLTVVFENNWQPERQVPFNEVRLPPPPDIKKEISEGDEVEVYSRANDQEPCGWWLAKVRMMKGEFYVIEYAACDATYNEIVTFERLRPVNQNKTVKKNTFFKCTVDVPEDLREACANENAHKDFKKAVGACRIFYHPETTQLMILSASEATVKRVNILSDMHLRSIRTKLMLMSRNEEATKHLECTKQLAAAFHEEFVVREDLMGLAIGTHGSNIQQARKVPGVTAIELDEDTGTFRIYGESADAVKKARGFLEFVEDFIQVPRNLVGKVIGKNGKVIQEIVDKSGVVRVRIEGDNENKLPREDGMVPFVFVGTKESIGNVQVLLEYHIAYLKEVEQLRMERLQIDEQLRQIGSRSYSGRGRGRRGPNYTSGYGTNSELSNPSETESERKDELSDWSLAGEDDRDSRHQRDSRRRPGGRGRSVSGGRGRGGPRGGKSSISSVLKDPDSNPYSLLDNTESDQTADTDASESHHSTNRRRRSIRRRRTDEDAVLMDGMTDSDTASVNENGLVTVADYISRAESQSIQRNLPRETLAKNKKEMAKDVIEEHGPSEKAINGPTSASGDDISKATRVLRGEEKINPLKEENTQEAAVLNGVS

SEQ ID NO: 13132 - protein, 129 aa, Homo sapiens
TESERKDELSDWSLAGEDDRDSRHQRDSWRRPGGRGRSVSGGRGRGGPRGGKSSISSVLKDQPSNPYSLLDNTESDQTADTDASESHHSTNRRRRSRRRRTDEDAVLMDGMTESDTASVNENGLGKRCD

SEQ ID NO: 13133 - protein, 234 aa, Homo sapiens
PAACPSPANNICFYGECSYYCSTEHALCGKPDQIEGSLGAFLPDLSLAKRKTWRNPWRRSYHKRKKAEWEVDPDYCEEVKQTPPYDSSHRILDVMDMTIFDFLMGNMDRHHYETFEKFGNETFIIHLDNGRGFGKYSHDELSILVPLQQCCRIRKSTYLRLQLLAKEEYKLSLLMAESLRGDQEAPVLYQPHLEALDRRLRVVLKAVWDCVERNGLHSVVDDDLDTEHRAASAR

SEQ ID NO: 13134 - protein, 97 aa, Homo sapiens
  misc_feature (1)...(97): Xaa = X or * as defined in Table 2
GAQGLSLSPRLECNGAILAHCNLCLPGSSNSPGSASXVAGTIGMHHHARLMFVFLVESGFHHVGQAGLELLTSSDPPASASQSAGIRGISRRAGLDF

SEQ ID NO: 13135 - protein, 35 aa, Homo sapiens
LVCILNMEGRKALTWKYYAKGFEGKKSGFTPLVIP

SEQ ID NO: 13136 - protein, 44 aa, Homo sapiens
  misc_feature (1)...(44): Xaa = X or * as defined in Table 2
MVFKDQKMRFCFCNQXXXXLMNLXXXXXXVLREKKGGSPPFVFL

SEQ ID NO: 13137 - protein, 635 aa, Homo sapiens
  misc_feature (1)...(635): Xaa = X or * as defined in Table 2
MAAAAVDSAMEVVPALAEEAAPEVAGLSCLVNLPGEVLEYILCCGSLTAADIGRVSSTCRRLRELCQSSGKVWKEQFRVRWPSLMKHYSPTDYVNWLEEYKVRQKAGLEARKIVASFSKRFFSEHVPCNGFSDIENLEGPEIFFEDELVCILNMEGRKALTWKYYAKKILYYLRQQKILNNLKAFLQQPDDYESYLEGAVYIDQYCNPLSDISLKDIQAQIDSIVELVCKTLRGINRRHPSLTFIAGESSMIMEIELQSQVLDAMNYVLYDQLKFKGNRMDYYNALNLYMHQVLIRRTGIPISMSLLYLTIARQLGVPLEPVNFPSHFLLRWCQGAEGATLDIFDYIYIDAFGKGKQLTGKECEYLIGQHVTAALYGVVNVKKVLQRMVGNLLSLGKREGIDQSYQLLRDSLDLYLAMYPDQVQLLLLQARVYFHLGIWPEKSFCLVLKVLDILQHIQTLDPGQHGAVGYLVQHTLEHILERKKEEVGVEVKLRSDEKHRDVCYSIGLHYGRHKRYGLNXLCXFYGWGPHLAWMGHELDSRNMNVHSLPHGHHQPFYNVLVEDGSCRYAAQENLEYNAEPQEISHPDVGRVYSQRFTRTHYIPNAELEIRYPEDLEFVYETVQNIYKCKRKENIE

SEQ ID NO: 13138 - protein, 120 aa, Homo sapiens
FFSPETESHCIAQAGVQWQMLGSLQSPPPFSCLSLPSSYDYRHAPLHRANFLLFLRDGVSACWPATAPGLLLIFFGRAPWLMPVIPAPREAEAGGSLEARSSRPASLFQVSFFSPFFHMF

SEQ ID NO: 13139 - protein, 38 aa, Homo sapiens
FFFFGRDKSLTMLPRLVSNCWAQGILPSWPPEVLRLQA

SEQ ID NO: 13140 - protein, 44 aa, Homo sapiens
  DOMAIN (12)..(30): PROSTAGLANDIN D RECEPTOR SIGNATURE domain identified by eMATRIX, accession number PR00854B, p-value=5.939e-09, raw score of 7.30
FFFFFETETHTVARAGVQWCHLASLQPLPAGSSHSPAAASHVAS

SEQ ID NO: 13141 - protein, 30 aa, Homo sapiens
LATWMKSNTSCLVTTLSKWPLSRPQRSHSA

SEQ ID NO: 13142 - protein, 347 aa, Homo sapiens
ARPGPDMAALYACTKCHQRFPFEALSQGQQLCKECRIAHPVVKCTYCRTEYQQERLECNGTISAHCNLHLPGSSDSPASSSRVAGITGIKTNTICKKCAQNVQLYGTPKPCQYCNIIAAFIGNKCQRCTNSEKKYGPPYSCEQCKQQCAFDRKDDRKKVDGKLLCWLCTLSYKRVLQKTKEQRKHLSSSSRAGHQEKEQYSRLSGGGHYNSQKTLSTSSIQNEIPKKKSKFESITTNGDSFSPDLALDSPGTDHFVIIAQLKEEVATLKKMLHQKDQMILEKEKKITELKADFQYQESQMRAKMNQMEKTHKEVTEQLQAKNRELLKQAAALSKSKKSEKSGAITSP

SEQ ID NO: 13143 - protein, 318 aa, Homo sapiens
ARPGPDMAALYACTKCHQRFPFEALSQGQQLCKECRIAHPVVKCTYCRTEYQQERLECNGTISAHCNLHLPGSSDSPASSSRVAGITGIKTNTICKKCAQNVQLYGTPKPCQYCNIIAAFIGNKCQRCTNSEKKYGPPYSCEQCKQQCAFDRKDDRKKVDGKLLCWLCTLSYKRVLQKTKEQRKHLSSSSRAGHQEKEQYSRLSGGGHYNSFSPDLALDSPGTDHFVIIAQLKEEVATLKKMLHQKDQMILEKEKKITELKADFQYQESQMRAKMNQMEKTHKEVTEQLQAKNRELLKQAAALSKSKKSEKSGAITSP

SEQ ID NO: 13144 - protein, 142 aa, Homo sapiens
  DOMAIN (46)..(59): NAPIN SIGNATURE domain identified by eMATRIX, accession number PR00496E, p-value=5.500e-09, raw score of 8.94
  misc_feature (1)...(142): Xaa = X or * as defined in Table 2
GIIFMCPDMYTSKTFLKACLFALFFFIIYPIYFFLVGIMEEYIKMCNIPQVGIFSFKYLPXSLSVXFFFETESCFVTQAGVLWCYLSSLQPPPPGFKRFSCLSLSSSWDYRHLPPCPANFCIFSRDGVSPCWPGXSQTPDLR

SEQ ID NO: 13145 - protein, 89 aa, Homo sapiens
  misc_feature (1)...(89): Xaa = X or * as defined in Table 2
EIKYHSLPRLECRGEISAHXNLCLPGSSDSPATASXVAGITGMRHYAQLIFLFLVETXFHHVGQGWSRTPDSNDPPASASQGAGDYRRD

SEQ ID NO: 13146 - protein, 203 aa, Homo sapiens
  DOMAIN (73)..(96): LACY PROTON/SUGAR SYMPORTER SIGNATURE domain identified by eMATRIX, accession number PR00174A, p-value=9.625e-10, raw score of 8.67
  misc_feature (1)...(203): Xaa = X or * as defined in Table 2
LEARAGSYRPDLPGSHYLLAFFFFFFRRSLTLFSQAGVKWCDLGSSQPPSPGFKQFSCLSFLSSWDYRHAPPYRGXSFFFFFFFVFLVETGVSPCWARLVLNARPQVIHPPRASQSAGTTAVSHHAQPLCLFIYLFIYFYCIFLRLSFALGPQARVQWHNLSSLQPPPPGFKQFSCLSLPSSWDYRWPPPHPANFVFLLRYLR

SEQ ID NO: 13147 - protein, 120 aa, Homo sapiens
VCYPDRDCGESLVAASYRQPVPHQCGWFHPLKPASHPDTVECVFRKTPKIPQKHSGSPRPPPSPSYRGRFLFRFHPPQHGAQGPSPPPLGRKHRPSHTGSAALRACPPPGAAGLHSWGQL

SEQ ID NO: 13148 - protein, 88 aa, Homo sapiens
  DOMAIN (33)..(76): 'Homeobox' domain proteins domain identified by eMATRIX, accession number BL00027, p-value=6.000e-39, raw score of 26.43
  DOMAIN (19)..(75): Homeobox domain identified by PFam, accession name homeobox, E-value=1.5e-30, PFam score of 114.9
  misc_feature (1)...(88): Xaa = X or * as defined in Table 2
MRKVHVSTVTPNYAGGEPKRFRTAYTRQQVLELEKEFHYNRYLTRRRRVEIAHALCLSERQIKIWFQNRRMKWKKDHKLPNTKIRSGX

SEQ ID NO: 13149 - protein, 273 aa, Homo sapiens
  DOMAIN (199)..(242): 'Homeobox' domain proteins domain identified by eMATRIX, accession number BL00027, p-value=6.000e-39, raw score of 26.43
  DOMAIN (185)..(241): Homeobox domain identified by PFam, accession name homeobox, E-value=5.4e-32, PFam score of 119.7
MSSFLINSNYVDPKFPPCEEYSQSDYLPSDHSPGYYAGGQRRESSFQPEAGFGRRAACTVQRYAACRDPGPPPPPPPPPPPPPPPGLSPRAPAPPPAGALLPEPGQRCEAVSSSPPPPPCAQNPLHPSPSHSACKEPVVYPWMRKVHVSTGRYSLSEVGSWGGVEEVEEEKEEESNPNYAGGEPKRSRTAYTRQQVLELEKEFHYNRYLTRRRRVEIAHALCLSERQIKIWFQNRRMKWKKDHKLPNTKIHSGGAAGSAGGPPGRPNGGPRAL

SEQ ID NO: 13150 - protein, 169 aa, Homo sapiens
PPSPLSVGCLSFSFFFPFFFFIQSSLPKSFKRKISVVSTKGVPAGNSDTEGGQPGRKRRWGASTATTQKKPSISITTESLKSLIPDIKPLAGQEAVVDLHADDSRISEDETERNGDDGTHDKGLKICRTVTQVVPAEGQENGQREEEEEEKEPEAEPPVPSQVSVEVAL

SEQ ID NO: 13151 - protein, 1342 aa, Homo sapiens
  DOMAIN (38)..(56): MUSCARINIC M1 RECEPTOR SIGNATURE domain identified by eMATRIX, accession number PR00538F, p-value=5.235e-10, raw score of 10.59
  DOMAIN (72)..(106): SAP domain identified by PFam, accession name SAP, E-value= 1.4e-11, PFam score of 51.9
  misc_feature (1)...(1342): Xaa = X or * as defined in Table 2
MWRRKHPRTSGGTRGVLSGNRGVEYGSGRGHLGTFEGRWRKLPKMPEAVGTDPSTSRKMAELEEVTLDGKPLQALRVTDLKAALEQRGLAKSGQKSALVKRLKGALMLENLQKHSTPHAAFQPNSQIGEEMSQNSFIKQYLEKQQELLRQRLEREAREAAELEEASAESEDEMIHPEGVASLLPPDFQSSLERPELELSRHSPRKSSSISEEKGDSDDEKPRKGERRSSRVRQARAAKLSEGSQPAEEEEDQETPSRNLRVRADRNLKTEEEEEEEEEEEEDDEEEEGDDEGQKSREAPILKEFKEEGEEIPRVKPEEMMDERPKTRSQEQEVLERGGRFTRSQEEARKSHLARQQQEKEMKTTSPLEEEEREIKSSQGLKEKSKSPSPPRLTEDRKKASLVALPEQTASEEETPPPLLTKEASSPPPHPQLHSEEEIEPMEGPAPPVLIQLSPPNTDADTRELLVSQHTVQLVGGLSPLSSPSDTKAESPAEKVPEESVLPLVQKSTLADYSAQKDLEPESDRSAQPLPLKIEELALAKGITEECLKQPSLEQKEGRRASHTLLPSHRLKQSADSSSSRSSSSSSSSSRSRSRSPDSSGSRSHSPLRSKQRDVAQARTHANPRGRPKMGSRSTSESRSRSRSRSRSASSNSRKSLSPGVSRDSSTSYTETKDPSSGQEVATPPVPQLQVCEPKERTSTSSSSVQARRLSQPESAEKHVTQRLQPERGSPKKCEAEEAEPPAATQPQTSETQTSHLPESERIHHTVEEKEEVTMDTSENRPENDVPEPPMPIADQVSNDDRPEGSVEDEEKKESSLPKSFKRKISVVSATKGVPAGNSDTEGGQPGRKRRWGASTATTQKKPSISITTESLKSLIPDIKPLAGQEAVVDLHADDSRISEDETERNGDDGDPXQRGLKICRTVTQVVPAEGQENGQREEEEEEKEPEAEPPVPPQVSVEVALPPPAEHEVKKVTLGDTLTRRSISQQKSGVSITIDDPVRTAQVPSPPRGKISNIVHISNLVRPFTLGQLKELLGRTGTLVEEAFWIDKIKSHCFVTYSTVEEAVATRTALHGVKWPQSNPKFLCADYAEQDELDYHRGLLVDRPSETKTEEQGIPRPLHPPPPPPVQPPQHPRAEQREQERAVREQWAEREREMERRERTRSEREWDRDKVREGPRSRSRSRDRRRKERAKSKEKKSEKKEKAQEEPPAKLLDDLFRKTKAAPCIYWLPLTDSQIVQKEAERAERAKEREKRRKEQEEEEQKEREKEAERERNRQLEREKRREHSRERDRERERERERDRGDRDRDRERDRERGRERDRRDTKRHSRSRSRSTPVRDRGGRR

SEQ ID NO: 13152 - protein, 1991 aa, Homo sapiens
  DOMAIN (1343)..(1391): Cadherins extracellular repeat proteins domain proteins domain identified by eMATRIX, accession number BL00232B, p-value= 4.808e-39, raw score of 32.79
  DOMAIN (1265)..(1792): Cadherin domain identified by PFam, accession name cadherin, E-value=7.9e-88, PFam score of 305.2
KSSSISEEKGDSDDEKPRKGERRSSRVRQARAAKLSEGSQPAEEEEDQETPSRNLRVRADRNLKTEEEEEEEEEEEEDDEEEEGDDEGQKSREAPILKEFKEEGEEIPRVKPEEMMDERPKTRSQEQEVLERGGRFTRSQEEARKSHLARQQQEKEMKTTSPLEEEEREIKSSQGLKEKSKSPSPPRLTEDRKKASLVALPEQTASEEETPPPLLTKEASSPPPHPQLHSEEEIEPMEGPAPAVLIQLSPPNTDADTRELLVSQHTVQLVGGLSPLSSPSDTKAESPAEKVPEESVLPLVQKSTLADYSAQKDLEPESDRSAQPLPLKIEELALAKGITEECLKQPSLEQKEGRRASHTLLPSHRLKQSADSSSSRSSSSSSSSSRSRSRSPDSSGSRSHSPLRSKQRDVAQARTHANPRGRPKMGSRSTSESRSRSRSRSRSASSNSRKSLSPGVSRDSSTSYTETKDPSSGQEVATPPVPQLQVCEPKERTSTSSSSVQARRLSQPESAEKHVTQRLQPERGSPKKCEAEEAEPPAATQPQTSETQTSHLPESERIHHTVSHPPPSTPNPQPFSPCWCLQILRISRPLLIKQLIKHSEEKEEVTMDTSENRPENDVPEPPMPIADQVSNDDRPEGSVEDEEKKELESLRRCQPQLSEEKYSDLAAECLPGPGVFTYPQATFIRGSMIPLAATKGVPAGNSDTEGGQPGRKRRWGTSTATTQKKPSISITTESLKSLIPDIKPLAGQEAVVDLHADDSRISEDETERNGDDGTHDKGLKICRTVTQVVPAEGQENGQREEEEEEKEPEAEPPVPPQVSVEVALPPPAEHEVKKVTLGDTLTLRRSISQQKSGVSITIDDPVRTAQVPFPPRGKISNIVHISNLVRPFTLGQLKELLGRTGTLVEEAFWIDKIKSHCFVTYSTVEEAVATRTALHGVKWPQSNPKFLCADYAEQDELDYHRGLLVDRPSETKTEEQGIPRPLHPPPPPPVQPPQHPRAEQREQERAVREQWAEREREMERRERTRSEREWDRDKVREGPRSRSRSRDRRRKERAKSKEKKSEKKEKAQEEPPAKLLDDLFRKTKAAPCIYWLPLTDSQIVQKEAERAERAKEREKRRKEQEEEEQKEREKEAERERNRQLEREKRREHSRERDRERERERERDRGDRDRDRERDRERGRERDRRDTKRHSRSRSRSTPVRDRDLQRSAAPAPIGSGLCPGTRRQARLWRFPRPGPLAVPGSREHPGPALLRTRRSWVWNQFFVIEEYAGPEPVLIGKLHSDVDRGEGRTKYLLTGEGAGTVFVIDEATGNIHVTKSLDREEKAQYVLLAQAVDRASNRPLEPPSEFIIKVQDINDNPPIFPLGPYHATVPEMSNVGTSVIQVTAHDADDPSYGNSAKLVYTVLDGLPFFSVDPQTGVVRTAIPNMDRETQEEFLVVIQAKDMGGHMGGLSGSTTVTVTLSDVNDNPPKFPQSLYQFSVVETAGPGTLVGRLRAQDPDLGDNALMAYSILDGEGSEAFSISTDLQGRDGLLTVRKPLDFESQRSYSFRVEATNTLIDPAYLRRGPFKDVASVRVAVQDAPEPPAFTQAAYHLTVPENKAPGTLVGQISAADLDSPASPIRYSILPHSDPERCFSIQPEEGTIHTAAPLDREARAWHNLTVLATELDSSAQASRVQVAIQTLDENDNAPQLAEPYDTFVCDSAAPGQLIQVIRALDRDEVGNSSHVSFQGPLGPDANFTVQDNRDGSASLLLPSRPAPPRHAPYLVPIELWDWGQPALSSTATVTVSVCRCQPDGSVASCWPEAHLSAAGLSTGALLAIITCVGALLALVVLFVALRRQKQEALMVLEEEDVRENIITYDDEGGGEEDTEAFDITALQNPDGAAPPAPGPPARRDVLPRARVSRQPRPPGPADVAQLLALRLREADEDPGVPPYDSVQVYGYEGRGSSCGSLSSLGSGSEAGGAPGPAEPLDDWGPLFRTLAELYGAKEPPAP

SEQ ID NO: 13153 - protein, 63 aa, Homo sapiens
LLPYSTNPPASASRLAVIAGVHHHTQLIFFLVETGSHCVTQSGLKLPASSNPPTGLTMLGLQV

SEQ ID NO: 13154 - protein, 309 aa, Homo sapiens
  DOMAIN (165)..(203): Short-chain dehydrogenases/reductases family proteins domain identified by eMATRIX, accession number BL00061B, p-value=5.500e- 17, raw score of 25.79
  DOMAIN (37)..(227): short chain dehydrogenase domain identified by PFam, accession name adh_short, E-value=1.5e-45, PFam score of 164.8
MKFLLDILLLLPLLIVCSLESFVKLFIPKRRKSVTGEIVLITGAGHGIGRLTAYEFAKLKSKLVLWDINKHGLEETAAKCKGLGAKVHTFVVDCSNREDIYSSAKKVKAEIGDVSILVNNAGVVYTSDLFATQDPQIEKTFEVNVLAHFWTTKAFLPAMTKNNHGHIVTVASAAGHVSVPFLLAYCSSKFAAVGFHKTLTDELAALQITGVISLCLCPNFVNTGFIKNPSTSLGPTSSCSRVGPKLVPEEVVNRLMHGILTEQKMIFIPSSIAFLTTLERILPERFLAVLKRKISVKFEAVIGYKMKPH

SEQ ID NO: 13155 - protein, 400 aa, Homo sapiens
  DOMAIN (234)..(251): Zinc finger C2H2 type, domain proteins. domain identified by eMATRIX, accession number BL00028, p-value=1.000e-14, raw score of 16.07
  DOMAIN (8)..(396): Zinc finger, C2H2 type domain identified by PFam, accession name zf-C2H2, E-value=6.6e-107, PFam score of 368.6
IHTGENPYECHECGKAFSRKYQLISHQRTHAGEKPYECTDCGKAFGLKSQLIIHQRTHTGEKPFECSECQKAFNTKSNLIVHQRTHTGEKPYSCNECGKAFTFKSQLIVHKGVHTGVKPYGCSQCAKTFSLKSQLIVHQRSHTGVKPYGCSECGKAFRSKSYLIIHMRTHTGEKPHECRECGKSFSFNSQLIVHQRIHTGENPYECSECGKAFNRKDQLISHQRTHAGEKPYGCSECGKAFSSKSYLIIHMRTHSGEKPYECNECGKAFIWKSLLIVHERTHAGVNPYKCSQCEKSFSGEITPSLLHQRMHTTEKPYECSECGKAFIRNSQLIVHQRTHSGEKPYGCNECGKTFSQKSILSAHQRTHTGEKPCKCTECGKAFCWKSQLIMHQRTHVDDKH

SEQ ID NO: 13156 - protein, 64 aa, Homo sapiens
  misc_feature (1)...(64): Xaa = X or * as defined in Table 2
GIPGSSFCGLCGDVPGKPVXRADGSCXDGVAPRLLRPRGFRGGRCGPVLDSLAGQRGAESGCRG

SEQ ID NO: 13157 - protein, 139 aa, Homo sapiens
LLVFYLPTPSLKGGLRQLDMSLLCQLYSLYESIQEYKGACQAASSPNWTYALENGFFDEEEEYFPEQNSLHDRRDRGPPRDLSLPAPPSPAATGFWSPSRGSWEGCDCWEALPTGHAVIICCFSCKKAPPLWTVLGHRG

SEQ ID NO: 13158 - protein, 42 aa, Homo sapiens
  misc_feature (1)...(42): Xaa = X or * as defined in Table 2
XNYIRVFGGGTKLTVLGQPKAAPSVTLFPPSSEELQANKATL

SEQ ID NO: 13159 - protein, 93 aa, Homo sapiens
  misc_feature (1)...(93): Xaa = X or * as defined in Table 2
LHSRLDGAAICLPGHCHGSRVEVTYETHQCGLVGLKLLRGGREQSDRGGSLGLTXDGQLGPPAEQRTTQAVIPCCAVIMSLILRLEPTDGQGG

SEQ ID NO: 13160 - protein, 76 aa, Homo sapiens
RRQAQIAAGRVLVVALFGGCGGLHSRLDGAAICLPGHCHGSRVEVTYETHQCGLVGLKLLRGGREQSDRGGSLGLT

SEQ ID NO: 13161 - protein, 128 aa, Homo sapiens
APFMRDPAAVASVGFPLLGRQAQVAAGRILVVALFGGFGGLHSHLDGAAICLPGHCHGSRVEVTYETHQCGLVGLKLLRGGWEQSDRGGSLGLTEDGQVGASSEDSIISWPKHAVIVSLILRLEPGDE

SEQ ID NO: 13162 - protein, 178 aa, Homo sapiens
  misc_feature (1)...(178): Xaa = X or * as defined in Table 2
RRQAQITAGRVLVVALFGGCGGLHSRLDGAAICLPGHCHGSRVEVTYETHQCGLVGLKLLRGGREQSDRGGSLGLTXDGQLGPSAEHPLITTTIPHLTVIVGLIPGLDPGDGQGGRVPRAGAENRSGIPAGRSASXXMTNTGARPGFCWYHCTLLSPIFSPPQVILAVFPGATDTEGG

SEQ ID NO: 13163 - protein, 117 aa, Homo sapiens
  misc_feature (1)...(117): Xaa = X or * as defined in Table 2
RGGWEQSDRGGSLGLTEDGQLGASSEHRTMQAVIPCCTVIISLILRLESTDGQGGXGARLGARESVSDPXGPLIITIDEEFGGPSWDLLVPVYNINSDVGVASRTRDGDPLPGGPRR

SEQ ID NO: 13164 - protein, 124 aa, Homo sapiens
  DOMAIN (1)..(78): Immunoglobulin domain identified by PFam, accession name ig, E-value=9.5e-11, PFam score of 39.7
  misc_feature (1)...(124): Xaa = X or * as defined in Table 2
XQRVTISCTGSSSTIGAGYDVHWYQQLPGTAPKLLIYGNSNRPSGVPDRFSGSKSGTSASLAITGLQAEDEADYYCQSYDSSLSGYWVFGGGTKLTVLGQPKAAPSVTLFPPSSEELQANKATL

SEQ ID NO: 13165 - protein, 131 aa, Homo sapiens
  misc_feature (1)...(131): Xaa = X or * as defined in Table 2
RVLVVALFGGCGGLHSRLDGAAICLPGHCHGSRVEVTYETHQCGLVGLKLLRGGREQNDRGGSLGLTXDGQLGPSAEHPSGTTTSSIXTAIIISLGLSLEPINCQGGRGGTLGSIEIYNKPLRADYRPHKS

SEQ ID NO: 13166 - protein, 128 aa, Homo sapiens
LPGGPGTMVAFGGLPTVQGRVQGALAPVLVGACLEGCGGLHSRLDGAAICLPGHCHGSRVEVTYETHQCGLVGLKLLRGGREQSDRGGSLGLDLGRSAWSLRRIPHDKDHWCLLIDSNSQPRLLPGRH

SEQ ID NO: 13167 - protein, 20 aa, Homo sapiens
MAWLPGSCARVAFPAGAAAR

SEQ ID NO: 13168 - protein, 302 aa, Homo sapiens
AGHRGRRAFRGKGQGQRGSRLGAGFSGWDKRWWVKGVSVRAEIEGVTGVPARDNSIQAGGREVGGYALRRRGRNERAEGLVFSDQTSPIRASFTRRHPGRLCASPSGPLSHWVPGFPHPTLRTQGRPPIMCEIRKEEREQDFSLTMRIFIEKGWMTWDGGRDPSPGNLQLQAPVGGVRVGGLKAFCRGHCLLHGAPFMRDPAAVASVGLPLLGRQAQVAAGRILVVALFGGFGGLQSHLDRAAICLPSHCTGPRVKIHFKKNHVGLVGLKLLRGGWEQSDRGGSLGLTEDGQLGASSEHSTQ

SEQ ID NO: 13169 - protein, 111 aa, Homo sapiens
  misc_feature (1)...(111): Xaa = X or * as defined in Table 2
MGYKKGEGGEGWGENADVLAECKRCWPFXXXXXXXXXXXXXXXXXXXXXXXXXXXXXXXXXXXXXXXXXXXXXXXXXXXXXXXXXXXXXXXXXXXXRKKKAAVSQDHADAW

SEQ ID NO: 13170 - protein, 70 aa, Homo sapiens
  misc_feature (1)...(70): Xaa = X or * as defined in Table 2
MCVSGYXXXXXXXXXXXXXXXXXXXXXXXXEGSTSFTFCKHICIFTPPFPSFSLFISHFYIDLLFYNKTL

SEQ ID NO: 13171 - protein, 221 aa, Homo sapiens
  DOMAIN (68)..(91): LACY PROTON/SUGAR SYMPORTER SIGNATURE domain identified by eMATRIX, accession number PR00174A, p-value=8.105e-09, raw score of 8.67
  misc_feature (1)...(221): Xaa = X or * as defined in Table 2
FLQLGSWLGRGSCQVSRGPGQPRSDNLLVEPKDLKGNLTHFTTLGGFHLLYMMIWIHPPINLCSGSNFFFLFFFFFSFSLRLGLALLPQAGVEWRDLGLLQPLPPRLEQSCPSSGSSWDRRFMPPWPANFCMFLXRWGLTVLPRLVSNSWAQCDPPVSASQSAGITIVSHHVQLEGSTSFTFCKHICIFTPPFPSFSLFISHFYIDLLFYNKTLLPKKKKK

SEQ ID NO: 13172 - protein, 131 aa, Homo sapiens
  DOMAIN (103)..(125): FOS TRANSFORMING PROTEIN SIGNATURE domain identified by eMATRIX, accession number PR00042D, p-value=1.000e-08, raw score of 8.97
AEVAELKAEKENSEAQVENAQRIQVERLKQECRNFRSQAEKAQLEAEKTLEEKQIQWLEEKHKLHERITDREEKYNQAKEKLQRAAIAQKKRKSLHENKLKRLQEKVEVLEAKKEELETENQVLNRQNVPF

SEQ ID NO: 13173 - protein, 475 aa, Homo sapiens
  DOMAIN (453)..(475): FOS TRANSFORMING PROTEIN SIGNATURE domain identified by eMATRIX, accession number PR00042D, p-value=1.000e-08, raw score of 8.97
MRERFRNLDEEVEKYRAVYNKLRYEHTFLKSEFEHQKEEYARILDEGKIKYESEIARLEEDKEELRNQVLNVDLTKDSKRVEQLAREKVYLCQKLKGLEAEVAELKAEKENSEAQVENAQRIQVRQLAEMQATVRSLEAEKQSANLRAERLEKDSLQSSSEQNTFLINKLHKAEREINTLSSKVKELKHSNKLEITDIKLETARAKSELDRERNKIHSELDYLHLDNEILKAAVEHHKVLLVKKDRELIRKVQAAKEEGYQKLVVLQDEKLELENRLADLEKMKVEHDVWRQSEKDQYEEKLRASQMAEEITRKELQSVRLKLQQQIVTIENAEKEKNENSDLKQQISSLQIQVTSLAQSENDLLNSNQMLKEMVERLKQECRNFRSQAEKAQLEAEKTLEEKQIQWLEEKHKLHERITDREEKYNQAKEKLQRAAIAQKKRKSLHENKLKRLQEKVEVLEAKKEELETENQVLK

SEQ ID NO: 13174 - protein, 609 aa, Homo sapiens
NYKTLIIICALFTLVTVLLWNKCSSDKAIQFPRRSSSGFRVDGFEKRAAASESNNYMNHVAKQQSEEAFPQEQQKAPPVVGGFNSNVGSKVLGLKYEEIDCLINDEHTIKGRREGNEVFLPFTWVEKYFDVYGKVVQYDGYDRFEFSHSYSKVYAQRAPYHPDGVFMSFEGYNVEVRDRVKCISGVEGVPLSTQWGPQGYFYPIQIAQYGLSHYSKNLTEKPPHIEVYETAEDRDKNKPNDWTVPKGCFMANVADKSRFTNVKQFIAPETSEGVSLQLGNTKDFIISFDLKFLTNGSVSVVLETTEKNQLFTIHYVSNAQLIAFKERDIYYGIGPRTSWSTVTRDLVTDLRKGVGLSNTKAVKPTKIMPKKVVRLIAKGKGFLDNITISTTAHMAAFFAASDWLVRNQDEKGGWPIMVTRKLGEGFKSLEPGWYSAMAQGQAISTLVRAYLLTKDHIFLNSALRATAPYKFLSEQHGVKAVFMNKHDWYEEYPTTPSSFVLNGFMYSLIGLYDLKETAGEKLGKEARSLYERGMESLKAMLPLYDTGSRTIYDLRHFMLGIAPNLARWDYHTTHINQLQLLSTIDESPIFKEFVKRWKSYLKGSRAKHN

SEQ ID NO: 13175 - protein, 99 aa, Homo sapiens
LLRQGLALLPRLECSGTISAYCNLCLPGSNHPPVSVSQVAGTTGVHHHAQLIFVFWVETGFCHVAQYGLEFLGSSNPPALTSPSAGITGVSHCIWAQVF

SEQ ID NO: 13176 - protein, 131 aa, Homo sapiens
PAGGPAAGRAAARAGAMAKLLSCVLGPRLYKIYRERDSERAPASVPETPTAVTAPHSSSWGYLSLSKVVPFSHYAGTLLLLLAGVACLRSIGRWTNPQYRQFITILEATHRNQSSENKRQLANYNFDFRSW

SEQ ID NO: 13177 - protein, 137 aa, Homo sapiens
GTCPFYLCPPETWVSRPFLLTSNRGNDLLLKLLQHRYPRVMAEEGLRVVRQWLEASSQLEEASIYSRWEVEEDWCLSVLRSYQAEHGPDFPWSVGEDMSADGRRQLALFLARKHLHNFEGTYWNPIPKPKTFKRPWH

SEQ ID NO: 13178 - protein, 143 aa, Homo sapiens; identical to SEQ ID NO: 8541
  DOMAIN (21)..(43): Globins profile domain identified by eMATRIX, accession number BL01033A, p-value=2.929e-17, raw score of 16.94
  DOMAIN (10)..(143): Globin domain identified by PFam, accession name globin, E- value=4.3e-55, PFam score of 196.4

SEQ ID NO: 13179 - protein, 259 aa, Homo sapiens
LIALRTCTESPGTTHASADAWEAKLLSCVLCPRLYKIYRERDSEGAPISETETPTADTAPHSSSWDTYYQPRALEKHADSILALASIFWPISYYSCTFAFFYLYRKGYLSLSKVVPFSHYAGTLLLLLAGVACLRGIGRWTNPQYRQFITILEATHREPSLQKTKRQLANYNFDFRSWPVDFHWEEPSSRKESRGGPSRRGVALLRPEPLHRGTADTLLNRVKKLPCQITSYLVAHTLWRRMLYPGSVYLLQKALMPVL

SEQ ID NO: 13180 - protein, 66 aa, Homo sapiens
HTRTVTQSLPCWYFSQTSGRSPRLVKECNGPWIQSIKHLGCLLNQGHSGWGCLPSSSSGSQVQDHV

SEQ ID NO: 13181 - protein, 585 aa, Homo sapiens
  DOMAIN (9)..(54): Casein kinase II regulatory subunit proteins domain identified by eMATRIX, accession number BL01101A, p-value=1.000e- 40, raw score of 16.07
  DOMAIN (5)..(138): Casein kinase II regulatory subunit domain identified by PFam, accession name CK_II_beta, E-value=1.1e-12, PFam score of 5.0
MSSSEEVSWISWFCGLRGNEFFCEVDEDYIQDKFNLTGLNEQVPHYRQALDMILDLEPGIGRWTNPQYRQFITILEATHRNQSSENKRQLVYYFFDFRSWPVDFHWEEPSSRKESRGGPSRRGVALLRPEPLHRGTADTLLNRVKKLPCQITSYLVAHTLGRRMLYPGSVYLLQKALMPVLVQGQARLVEKCNGRRAKLLACDGNEIDTMFVDRRGTAEPQGQKLVICCEGNAGFYEVGCVSTPLEAGYSVLGWNHPGFAGSTGVPFPQNEANAMDVVDQFAIHRLFFHPQDIIIYALAIGGFTATWAAMSYPDVSAMILDASFDDLVPLALKVMPDSWRGLVTRTVRQHLNLNNAEQLCRYQGPVLLIRKTQDGNLTPTVPKDICSNRANCLLVKALQHRYPGVMAEEGLLVARQWLEASSQLEEASIYSRWEVEEDWCLSVLRSYQAEHGADFPWSVGEDMSADGRRQAGPLFPGLGKASCHNFGGPTHCTPLPSPQNFPRCPWHPLGTQLGLIMEEWGERRHEERPFLFVILLCFMFAVYKFCGKVGGPFPLLTTVPLARFPSFMWLYLTFSNIHPALHEMG

SEQ ID NO: 13182 - protein, 58 aa, Homo sapiens
DLKKHEVKHLIDKLEEKFRLNRRELIAFEFPVLVALEFALHLPEHEVMPHYRRLVQSS

SEQ ID NO: 13183 - protein, 336 aa, Homo sapiens
MIAPLGLGVLARDQYRQAALADWDLKLDGGRQSTGAVSLKEIIGLEGVELGADGKTVSYTQFLLPTNAFGARRNTIDSTSSFSQFRNLSHRSLSIGRASGTQGSLDTGSDLGDFMDYDPNLLDDPQWPCGKHKRVLIFPSYMLCTQLPCSQAFKCSTVHSSDLSLHERNEHPCKKHNCLLQEGHSPLQAPGFRRALVVAPMQVFPLLMALGVTTVIDYVKPSDLKKDMNKFFKEKFPHIKLTLNKIRTLKREMRKLAQEDCALEEPTVPMAFVYFEKLALKGKLNKQNRKLCAGACVLVSSQYKFGSDLKKHEVKHLIDKLEEKFRLNRARTGFAF

SEQ ID NO: 13184 - protein, 91 aa, Homo sapiens; identical to SEQ ID NO: 11542
  DOMAIN (6)..(82): Protein of unknown function DUF122 domain identified by PFam, accession name DUF122, E-value=7.1e-19, PFam score of 76.1

SEQ ID NO: 13185 - protein, 75 aa, Homo sapiens
VSKLKHLLKPEKTKAVENYLIQMARYGQLSEKVSLDSLEELYCYLLYQNMASKGQLHLHWITEFLLTLRRNCWRE

SEQ ID NO: 13186 - protein, 92 aa, Homo sapiens
  DOMAIN (1)..(48): 1 kw CHROMO BROMODOMAIN SHADOW GLOBAL domain identified by eMATRIX, accession number DM00547F, p-value=7.623e-27, raw score of 23.43
GNPLFFLELHWNPSLRIQACDRIYRVGQQKDVSIPRFVCGGTVEESILHFQEKKIDLAKQFLSGSGESVTKLTLSDLRVLIGIYPPVDRVSE

SEQ ID NO: 13187 - protein, 157 aa, Homo sapiens
LFVLLQVNVSGNELCLMTSHLESTRGHAAERMNQLKMVLKKMQEAPESATVIFAGDTNLRDREVTRCGGLPNNIVDVWEFLGKPKHCQYTWDTQTELLILGITAACKLRFDRIFFRAAAEEGHIIPRSLDLLGLEKLDCGRFPSDHWGLLCNLDIIL

SEQ ID NO: 13188 - protein, 104 aa, Homo sapiens
  DOMAIN (1)..(22): Profilins domain identified by PFam, accession name profilin, E-value=0.061, PFam score of 11.7
  misc_feature (1)...(104): Xaa = X or * as defined in Table 2
MGKEGVHGGLINKKCYEMAFPLQAFPVLTSSVPSPSPLPTALHPFXXHTHTNHFIFWAITPYPLLLPKPHGLGARAGWTDTSPYPYPSRVWLENFCFLGFFFSE

SEQ ID NO: 13189 - protein, 84 aa, Homo sapiens
NMVLSLIFHIQELPQAVCEILGLQGSEVTTPDSDVGEDENVVMTPCPTSAFQSNALPTLSASGARNDSPTQIPVSSDVCRLTPA

SEQ ID NO: 13190 - protein, 32 aa, Homo sapiens
  misc_feature (1)...(32): Xaa = X or * as defined in Table 2
IPGRPWRLXAXPVTLRLQTQATCGGXMVRASL

SEQ ID NO: 13191 - protein, 163 aa, Homo sapiens
  DOMAIN (48)..(65): BETA HAEMOGLOBIN SIGNATURE domain identified by eMATRIX, accession number PR00814A, p-value=1.000e-22, raw score of 12.94
  DOMAIN (21)..(101): Globin domain identified by PFam, accession name globin, E- value=5.2e-18, PFam score of 67.2
  misc_feature (1)...(163): Xaa = X or * as defined in Table 2
HSLFGTSEVINKLRSPDAMGHFTEEDKGTITSLWGKVNVEDAGGETLGRLLVVYPWTQRFFDSFGNLSSASAIMGNPKVKAHGKKVLTSLGDAIKHLGXSQGAPFAQAXSELHCDKAALLDPEELSSFLGEMLLGDPFLGNPIFGQKNFTPEGCKAFLGQKDG

SEQ ID NO: 13192 - protein, 309 aa, Homo sapiens
  DOMAIN (82)..(92): PROFILIN SIGNATURE domain identified by eMATRIX, accession number PR00392A, p-value=3.769e-11, raw score of 14.10
  DOMAIN (81)..(232): Profilins domain identified by PFam, accession name profilin, E-value=0.027, PFam score of 12.9
  misc_feature (1)...(309): Xaa = X or * as defined in Table 2
FLKLHLQSSVSGLASGGGREWGAGSGVRGLLHSERSRGPDGSACPELSASPRPASRGSSSPVRGRQQQRPRAAPVAAPWPCWNAYIDNLMADGTCVTGAIVRYQDSEPPVWAAVPGKTFVNITPAXGGLSLVGKDRSSFLRXMGLTLWGGQKCSVIRGLTCLQDGEFSAMDLRYQEPPGGAPTFQCSLFTKTDKDGXVLADGAKEGVHGGLTNKKCYEMASHLSGFPSTDHRLSLPLHRSPTAFAPLSSPYTHHPFLFFGPLPHTPYCCQNHMGLGGQGLMGQTPSPTHIPSRVWYGKLLFFGVFFFSE

SEQ ID NO: 13193 - protein, 78 aa, Homo sapiens
RKTFFFLKCSLYKQKLWWISVAIHRSLSRKVILSSVFIKKQSDFYQLPFFNKSCFKEVFSISVYSMETNTWNLYYSYT

SEQ ID NO: 13194 - protein, 61 aa, Homo sapiens
ESSCLSLPSSWDHRHGRPWLADFSVFFCYRNSLTMLPRLGLNSWPQAILPPWPPKVLGLQA

SEQ ID NO: 13195 - protein, 206 aa, Homo sapiens; identical to SEQ ID NO: 9212

SEQ ID NO: 13196 - protein, 158 aa, Homo sapiens
HPVRFFVHRGPHVDFSLEVVSQWYELVVFTASMEIYGSAVADKLDNSRSILKRRYYRQHCTLELGSYIKDLSVVHSDLSSIVILDNSPGAYRSHPDNAIPIKSWFSDPSDTALLNLLPMLDALRFTADVRSVLSRNLHQHRPLTGTTGGTLGEPNQCL

SEQ ID NO: 13197 - protein, 273 aa, Homo sapiens
  misc_feature (1)...(273): Xaa = X or * as defined in Table 2
WNSAELGRGGPGAGGAGVIGMMRTQCLLGLRTFVAFAAKLWSFFIYLLRRQIRTVIQYQTVRYDILPLSPVSRNRLAQVKRKILVLDLDETLIHSHHDGVLRPTVRPGTPPDFILKVVIDKHPVRFFVHKRPHVDFFLEVVSQWYELVVFTASMEIYGSAVGRLNWDNSRSILXGGRYYRQPAPLELGSYIKGPLCWFHSDLSSIVILDNSPGAYRSHPGYGGRDNAIPIKSWVSVTPSDTALLNLLPMLDALRFTADVRSVLSRNLHQHRLW

SEQ ID NO: 13198 - protein, 85 aa, Homo sapiens
  misc_feature (1)...(85): Xaa = X or * as defined in Table 2
EAESRSVPRLECSGPILAGCMLHLPGSCHFPASASQVAGTTHARHHTQLIFAFLVENGLCXPGWSRSPDLVIRLPWPPKVLGLQA

SEQ ID NO: 13199 - protein, 122 aa, Homo sapiens
IRGQYMWGPVSSSLFCSMGYLVFGFFSFIFFFCDEVLLLSTRLECNGTISGHCNLCLPGSSHSPVSASRVAGTTGARNKARLIFLYFFLVEMGFHHISQDGLDLLNLVIRPPWPPKVLGLQA

SEQ ID NO: 13200 - protein, 347 aa, Homo sapiens
  DOMAIN (29)..(46): Zinc finger C2H2 type, domain proteins. domain identified by eMATRIX, accession number BL00028, p-value=7.600e-10, raw score of 16.07
  DOMAIN (1)..(113): Zinc finger, C2H2 type domain identified by PFam, accession name zf-C2H2, E-value=5.1e-12, PFam score of 53.4
SCGWTFTSMSKLLRHRRKHDDDRRFTCPVEGCGKSFTRAEHLKGHSITHLCTKPFECPVERCCARVSARSSLYIHSKKHVQDVGAPKSRCPVSTCNRLFTSKHSMKAHMVRQHSRRQDLLPQLEAPSSLTPSSELSSPGQRELTNMDLAALFSDTPANASGSAGGSDEALNSGILTIDVTSVSSSLGGNLPANNSSLGPMEPLVLVAHSDIPPSLDSPLVLGTAATVLQQGSFSVDDVQTVSAGALGCLVALPMKNLSDDPLALTSNSNLAAHITTPTSSSTPRENASVPELLAPIKVEPDSPSRPGAVGQQEGSHGLPQSTLPSPAEQHGAQDTELSAGTGNFYLV

SEQ ID NO: 13201 - protein, 118 aa, Homo sapiens
  misc_feature (1)...(118): Xaa = X or * as defined in Table 2
MEVACRQSTSWQPMDLASSSDFRPRMQNPTTNRHSQANSCLQGDSGPRRMSASKRYFEKTNAICRPSSFTKHSRESSGSPGVSRSCTGTRFXNVTKQPYFTSSKHRKTGKVKVRISVV

SEQ ID NO: 13202 - protein, 143 aa, Homo sapiens; identical to SEQ ID NO: 8541
  DOMAIN (21)..(43): Globins profile domain identified by eMATRIX, accession number BL01033A, p-value=2.929e-17, raw score of 16.94
  DOMAIN (10)..(143): Globin domain identified by PFam, accession name globin, E- value=4.3e-55, PFam score of 196.4

SEQ ID NO: 13203 - protein, 80 aa, Homo sapiens
  DOMAIN (7)..(80): Ribosomal protein L6e domain identified by PFam, accession name Ribosomal_L6e, E-value=0.074, PFam score of -84.0
FSCLILHDAFPCLILHDAFPCSLCSVTGSLVLSRVPLRGTHQKSAIATSTKIALSNMKILKHHTDAYFKKQQLFFDVSKK

SEQ ID NO: 13204 - protein, 3 aa, Homo sapiens
MAV

SEQ ID NO: 13205 - protein, 160 aa, Homo sapiens
  misc_feature (1)...(160): Xaa = X or * as defined in Table 2
SLEVPLGFLLYLSFILLYSCFPLSNRVLLCHRDPFLSFLDLFLLPAFSPDYVQFLFLXCPQFSIRHXTLXMLHCKCLDFFFFFFFFETRFHSPSLRLECSGMISAYCSPTSWTQVRGTTGTCHHAWLVFIFSVETGFHHVAQPDLQLLPPRPPKVLRLQV

SEQ ID NO: 13206 - protein, 137 aa, Homo sapiens
LWREGPKWNAARLNESTTFVSVSRPTIACGMVGTIVRFYIKSPHLFKYAADPRDKHWLAEQHHMRATGGKMAYLLIEEDIPGPCGPVMITEDALDLKLEGIEIPLSLPSWMVEKMRKYMETLRTENEHRAVEAPPQT

SEQ ID NO: 13207 - protein, 418 aa, Homo sapiens
VGDNSIDSWKNAGRVFKDSDKFDANDPILKDQTQEWSGSATFTSDGKIRLFYTDYSGKHYGKQSLTTAQVNVSKSDDTLKINGVEDHKTIFDGDGKTYQNVQQFIDEGNYTSGDNHTLRDPHYVEDKGHKYLVFEANTGTENGYQGEESLFNKAYYGGGTNFFRKESQKLQQSAKKRDAELANGALGIIELNNDYTLKKVMKPLITSNTVNEGKEEPGRPAGEVSMGCLASEKGGKSSRSPEDPEKLPIAKPNNAYEFGQIINALSTRKDKEACAHLLAITAPKDLPMFLSNKLEGDTFLLLIQSLKNNLIEKDPSLVYQHLLYLSKAERFKGFCRFRNHHQTGFSPAGANQRGPLAATLSGPGGEGQSAVARLTGEKKNHPGAQYANRLSPRVGRFINAAGTTGFPTGKRAVSATQL

SEQ ID NO: 13208 - protein, 529 aa, Homo sapiens
  DOMAIN (92)..(329): TPR Domain domain identified by PFam, accession name TPR, E- value=3.5e-26, PFam score of 100.4
GRPARGAPQRGQTPEAGADKRATAGLCGGGGGRRRHRASGRRAGRGEPAGLKSQGQRAVPKRAVARGGRQYSAAIALLEPAGSEIADDLSILYSNRAACYLKEGNCSGCIQDCNRALELHPFSMKPLLRRAMAYETLEQYGKAYVDYKTVLQIDCGLQLANDSVNRLSRILMELDGPNWREKLSLIPAVPASVPLQAWHPAKEMISKQAGDSSSHRQQGITDEKTFKALKEEGNQCVNDKNYKDALSKYSECLKINNKECAIYTNRALCYLKLCQFEEAKQDCDQALQLADGNVKAFYRRALAHKGLKNYQKSLIDLNKVILLDPSIIEAKMELEEVTRLLNLKDKTAPFNKEKERRKIEIQEVNEGKEEPGRPAGEVSTGCLASEKGGKSSRSPEDPEKLPIAKPNNAYEFGQIINALSTRKDKEACAHLLAITAPKDLPMFLSNKLEGDTFLLLIQSLKNNLIEKDPSLVYQHLLYLSKAERFKMMLTLISKGQKELIEQLFEDLSDTPNNHFTLEDIQALKRQYEL

SEQ ID NO: 13209 - protein, 148 aa, Homo sapiens
  DOMAIN (95)..(115): HEPARIN BINDING GROWTH FACTOR FAMILY SIGNATURE domain identified by eMATRIX, accession number PR00263D, p-value=6.143e- 22, raw score of 12.89
  DOMAIN (23)..(148): Fibroblast growth factor domain identified by PFam, accession name FGF, E-value=3.8e-59, PFam score of 205.0
MAEGEITTFTALTEKFNLPPGNYKKPKLLYCSNGGHFLRILPDGTVDGTRDRSDQHIQLQLSAESVGEVYIKSTETGQYLAMDTDGLLYGSQTPNEECLFLERLEENHYNTYISKKHAEKNWFVGLKGPRTHYGQKAILFLPLPVSSD

SEQ ID NO: 13210 - protein, 51 aa, Homo sapiens
  DOMAIN (12)..(25): HEPARIN BINDING GROWTH FACTOR FAMILY SIGNATURE domain identified by eMATRIX, accession number PR00263A, p-value=7.231e- 13, raw score of 13.39
  DOMAIN (8)..(51): Fibroblast growth factor domain identified by PFam, accession name FGF, E-value=1.1e-14, PFam score of 53.7
FNLPPGNYKKPKLLYCSNGGHFLRILPDGTVDGTRMDTDGLLYGSQTPNEE

SEQ ID NO: 13211 - protein, 176 aa, Homo sapiens
  DOMAIN (27)..(40): HEPARIN BINDING GROWTH FACTOR FAMILY SIGNATURE domain identified by eMATRIX, accession number PR00263A, p-value=7.231e- 13, raw score of 13.39
  DOMAIN (23)..(57): Fibroblast growth factor domain identified by PFam, accession name FGF, E-value=5.3e-15, PFam score of 54.8
MAEGEITTFTALTEKFNLPPGNYKKPKLLYCSNGGHFLRILPDGTVDGTRDRSDQHSGLNYSWTMHQRLQALRTNDHFAGAHAVPSDAQVMGMDAGVYTRKPIPTSTTITLQTTKSTYVHDALFRAGPKMNPYESHVTGAGYETYLRQQWECPQVNKLEHVQNRAGNYQPLPSKKI

SEQ ID NO: 13212 - protein, 210 aa, Homo sapiens
  DOMAIN (141)..(161): HEPARIN BINDING GROWTH FACTOR FAMILY SIGNATURE domain identified by eMATRIX, accession number PR00263D, p-value=6.143e- 22, raw score of 12.89
  DOMAIN (105)..(199): Fibroblast growth factor domain identified by PFam, accession name FGF, E-value=1.3e-45, PFam score of 159.0
  misc_feature (1)...(210): Xaa = X or * as defined in Table 2
QRGPLPEDPSGWHSGWDKGQERPAHRHQMRNVCSWKGWRRTITTPIYPRSMQRRIGLLASRRMGAANAVLGLTMARKQSCXAMAEGEITTFTALTEKFNLPPGNYKKPKLLYCSNGGHFLRILPDGTVDGTRDRSDQHQTPNEECLFLERLEENHYNTYISKKHAEKNWFVGLKKNGSCKRGPRTHYGQKAILFLPLPVSYNSRDLFWEG

SEQ ID NO: 13213 - protein, 164 aa, Homo sapiens
  DOMAIN (31)..(53): Globins profile domain identified by eMATRIX, accession number BL01033A, p-value=2.929e-17, raw score of 16.94
  DOMAIN (10)..(99): Globin domain identified by PFam, accession name globin, E- value=4.7e-21, PFam score of 77.8
APSPDAMGHFTEEDKATITSLWGKVNVEDAGGETLGRLLVVYPWTQRFFDSFGNLSSASAIMGNPKVKAHGKKVLTSLGDAIKHLDDLKGTFAQADVNCTCDKLHVDPENFKLLGNVLVTVLGNPIFGKEFTPEGCKASWAERWVTWSWPVPCSSRIPLKPLCP

SEQ ID NO: 13214 - protein, 268 aa, Homo sapiens
  DOMAIN (208)..(228): HEPARIN BINDING GROWTH FACTOR FAMILY SIGNATURE domain identified by eMATRIX, accession number PR00263D, p-value=5.404e- 16, raw score of 12.89
  DOMAIN (23)..(268): Fibroblast growth factor domain identified by PFam, accession name FGF, E-value=2.7e-49, PFam score of 171.5
MAEGEITTFTALTEKFNLPPGNYKKPKLLYCSNGGHFLRILPDGTVDGTRDRSDQHSGLNYSWTMHQRLQALRTNDHFAGAHAVPSDAQVMGMDAGVYTSSKTIAAFVIVLLYHSQVHLSVSLIMQKPQVQGPWLALSQQLQEDVGLENWNEVTLESWTPSQLHKPLSLVQLQLSAESVGEVYIKSTETGQYLAMDTDGLLYGSQTPNEECLFLGGLEENHYNTYISKKHAEKNWFVGLKKNGSCKRGPRTHYGQKAILFLPLPVSSD

SEQ ID NO: 13215 - protein, 489 aa, Homo sapiens
  DOMAIN (54)..(386): Putative diphthamide synthesis protei domain identified by PFam, accession name Diphthamide_syn, E-value=3.8e-15, PFam score of 63.8
MESMFSSPAEAALQRETGVPGLLTPLPDLDGVYELERVAGFVRDLGCERVALQFPDQLLGDAVAVAARLEETTGSKMFILGDTAYGSCCVDVLGAEQAGAQALIHFGPACLSPPARPLPVAFVLSSTFCGLGTLCQDLWGPKPRPQSACGAAGEPACAHALEALATLLRPRYLDLLVSSPAFPQPVGSLSPEPMPLERFGRRFPLAPGRRLEEYGAFYVGGSKASPDPDLDPDLSRLLLGWAPGQPFSSCCPDTGKTQDEGARAGGLRARRRYLVERARDARVVGLLAGTLGVAQHREALAHLRNLTQAAGKRSYVLALGRPTPAKLANFPEVDVFVLLACPLGALAPQLSGRLFQPILAPCELEAACNPAWPPPGLAPHLTHYADLLPGSPFHVALPPPESELWETPDVSLITGDLRPPPAWKSSNDHGSLALTPRPQLELAESSPAASFLSSRSWQGLEPRLGQTPVTEAVSGRRGIAIAYEDEGSG

SEQ ID NO: 13216 - protein, 113 aa, Homo sapiens
PTRPPTRPRTHGQECPLLDPVDFLLFRTRAGDPLRRVSSSFNKNLIFFSIKPQPPPCLAFHPRDPPGGSKRPLFWDPFKGPPILAPILSLTQIFFRWSCFFPKSRIAQGWALS

SEQ ID NO: 13217 - protein, 305 aa, Homo sapiens
  DOMAIN (97)..(147): RNA polymerases beta chain proteins domain identified by eMATRIX, accession number BL01166H, p-value=2.071e-17, raw score of 19.05
  DOMAIN (1)..(183): RNA polymerase beta subunit domain identified by PFam, accession name RNA_pol_B, E-value=1e-97, PFam score of 338.1
VCGLIVPQEDMPFCDSGICPDIIMNPHGFPSRMTVGKLIELLAGKAGVLDGRFHYGTAFGGSKVKDVCEDLVRHGYNYLGKDYVTSGITGEPLEAYIYFGPVYYQKLKHMVLDKMHARARGPRAVLTRIITHLSNNLFQRQPTEGRSRDGGLRLGEMERDCLIGYGASMLLLERLMISSDAFEVDVCGQCGLLGYSGWCHYCKSSCHVSSLRIPYACKLLFQELQSMNIIPSTARTGSVQLYNFIRQGLGKANPEFPFEESLETRTKCRTHRILQKRFVKAALFNNDGRKEGGGLSEHTSLEQPF

SEQ ID NO: 13218 - protein, 90 aa, Homo sapiens
  DOMAIN (12)..(34): RNA polymerase beta subunit domain identified by PFam, accession name RNA_pol_B, E-value=5.1e-08, PFam score of 30.4
GLRLGKIGRDCLIGYGASMLLLERLMISSDAFEVDVCGQCGLLGYSGWCHYCKSSCHVSSLPIPYACKLLFQELQSMNIIPRLKLSKYNE

SEQ ID NO: 13219 - protein, 75 aa, Homo sapiens
AQEYQKVVGPEGGGSRAHGTRELSVRCCLGHWSGHGSPRPALPPYQLLSAASLFQLDALQRHCEILCSQTLSMES

SEQ ID NO: 13220 - protein, 687 aa, Homo sapiens
  DOMAIN (137)..(150): REPEAT PROTEIN ANK NUCLEAR ANKYR domain identified by eMATRIX, accession number PD00078B, p-value=4.130e-09, raw score of 13.14
  DOMAIN (489)..(608): BTB/POZ domain identified by PFam, accession name BTB, E- value=1.5e-23, PFam score of 91.6
MTASIRRYHTCATDGEPDSSVLVGGDGDLTLLVAALGLDLGLPFMLLPPLMEWMRVAITYAEHRRSLTVDSGDIRQAARLLLPGPEHCFSSFRRLDARAATEKFNQDLGFRMLNCGRTDLINQAIEALGPDGVNTMDDQGMTPLMYACAAGDEAMVQMLIDAGANLDIQVPSNSPRHPSIHPDSRHWTSLTFAVLHGHISVVQLLLDAGAHVEGSAVNGGEDSYAETPLQLASAAGNYELVSLLLSRGADPLLSMLEAHGMGSSLHEDMNCFSHSAAHGHRGIWGLVTLGPLACLEEEDHETPSPRVPQSSPSGQEGTGGQLRNVLRKLLTQPQQAKADVLSLEEILAEGVEESDASSQGSGSEGPVRLSRTRTKALQEAMYYSAEHGYVDITMELRALGVPWKLHIWIESLRTSFSQSRYSVVQSLLRDFSSIREEEYNEELVTEGLQLMFDILKTSKNDSVIQQLATIFTHCYGSSPIPSIPEIRKTLPARLDPHFLNNKEMSDVTFLVEGKLFYAHKVLLVTASNRFKTLMTNKSEQDGDSSKTIEISDMKYHIFQMMMQYLYYGGTESMEIPTTDILELLSAASLFQLDALQRHCEILCSQTLSMESAVNTYKYAKIHNAPELALFCEGFFLKHMKALLEQMPSGSSSTAAAAKCRAWIHCRTCRTPWQSACTLSTSPPGSAA

SEQ ID NO: 13221 - protein, 46 aa, Homo sapiens
LFYEMESCSIAQAGVQWLSLGLLQAPPPGSCHSPASASCELMFFKI

SEQ ID NO: 13222 - protein, 101 aa, Homo sapiens
RSMRRGRVRILLGQNRDGIVFSTDDYFHHQDGYRYNVNQLGDAHDWNQNRAKQAIDQGRSPVIIDNTNIQAWEMKPYVEVAIGKGYRVEFHEPETWWKFDP

SEQ ID NO: 13223 - protein, 538 aa, Homo sapiens
  DOMAIN (406)..(423): Adenylate kinase proteins domain identified by eMATRIX, accession number BL00113A, p-value=4.927e-11, raw score of 12.74
MSYGEIEGKFLGPREEVTSEPRCKKLKSTTESYVFHNHSNADFHRIQEKTGNDWVPVTIIDVRGHSYLQENKIKTTDLHRPLHDEMPGNRPDVIESIDSQVLQEARPPLVSADDEIYSTSKAFIGPIYKPPEKKKRNEGRNEAHVLNGINDRGGQKEKQKFNSEKSEIDNELFQFYKEIEELEKEKDGFENSCKESEPSQEQFVPFYEGHNNGLLKPDEEKKDLSNKAMPSHCDYQQNLGNEPDKYPCNGQVIPTFCDTSFTSFRPEWQSVYPFIVPYGPPLPSLNYHLNIQRFSGPPNPPSNIFQAQDDSQIQNGYYVNNCHVNWNCMTFDQNNEYTDCSENRSSVHPSGNGCSMQDRYVSNGFCEVRERCWKDHCMDKHNGTDRFVNQQFQEEKLNKLQKLLILLRGLPGSGKTTLSRILLGQNRDGIVFSTDDYFHHQDGYRYNVNQLGDAHDWNQNRATSRLMGMRFWYKMMNTSMSDNDLGAGIKDMTKSSKNKRETDTLITFSTFDLLRGDLTEFCMNFVSNPVQTTMPIIR

SEQ ID NO: 13224 - protein, 89 aa, Homo sapiens
  misc_feature (1)...(89): Xaa = X or * as defined in Table 2
MRSEAQSGPHRREVVISHRYGTRPPGFKYQLQHXXXXXXXXXXXXXXXXXXXXXXXXXXXXXXXXXQNHTCVPWHACAYVSFNRVPCSC

SEQ ID NO: 13225 - protein, 585 aa, Homo sapiens
  DOMAIN (408)..(425): Adenylate kinase proteins domain identified by eMATRIX, accession number BL00113A, p-value=4.927e-11, raw score of 12.74
SKMSYGEIEGKFLGPREEVTSEPRCKKLKSTTESYVFHNHSNADFHRIQEKTGNDWVPVTIIDVRGHSYLQENKIKTTDLHRPLHDEMPGNRPDVIESIDSQVLQEARPPLVSADDEIYSTSKAFIGPIYKPPEKKKRNEGRNEAHVLNGINDRGGQKEKQKFNSEKSEIDNELFQFYKEIEELEKEKDGFENSCKESEPSQEQFVPFYEGHNNGLLKPDEEKKDLSNKAMPSHCDYQQNLGNEPDKYPCNGQVIPTFCDTSFTSFRPEWQSVYPFIVPYGPPLPSLNYHLNIQRFSGPPNPPSNIFQAQDDSQIQNGYYVNNCHVNWNCMTFDQNNEYTDCSENRSSVHPSGNGCSMQDRYVSNGFCEVRERCWKDHCMDKHNGTDRFVNQQFQEEKLNKLQKLLILLRGLPGSGKTTLSRILLGQNRDGIVFSTDDYFHHQDGYRYNVNQLGDAHDWNQNRAKQAIDQGRSPVIIDNTNIQAWEMKPYVEVAIGKGYRVEFHEPETWWKFDPEELEKRNKHGVSRKKIAQMLDRYEYQMSISIVMNSVEPSHKSTQRPPPPQGRQRWGGSLGSHNRVCVTNNH

SEQ ID NO: 13226 - protein, 96 aa, Homo sapiens
PFLCDLFHLVIFISDSLFLMVIDFVNGTFMISFINRILLGQNRDGIVFSTDDYFHHQDGYRYNVNQLGDAHDWNQNRGLFWAKCPRIEYLARSQKT

SEQ ID NO: 13227 - protein, 88 aa, Homo sapiens
FKMESGSVAKLECRGTISAHCNLRPPGSSDPPASASQIAATTGVHHHNRLIPAFLVETGFCHVDQAGLELLTLVIHPPRPPKVLGLQA

SEQ ID NO: 13228 - protein, 103 aa, Homo sapiens
RHNSSNFFFFFFFFETESRSIAQACMQWCYLSSLQSLPPGFKRFSCLSLPSSWDDRCPPPCLANFVFLVETGFCHVGQAGLELLISGDPPASASQSTGITGMI

SEQ ID NO: 13229 - protein, 44 aa, Homo sapiens
  DOMAIN (13)..(40): LIM domain containing proteins domain identified by PFam, accession name LIM, E-value=0.039, PFam score of 12.7
KEAPGLKKENNCFVCAICQINMEGKTLCSKKDRPICKSHAFFHV

SEQ ID NO: 13230 - protein, 105 aa, Homo sapiens
  misc_feature (1)...(105): Xaa = X or * as defined in Table 2
MPLKKLPHLFVKGSPNIKGXXXXXXXXXXXXXXXXXXXXXXXXXXXXXXXXXXXXXXXXXXXXXXXXXXXXXXXXXXXXXXXXXXXXXXXXXXXXXXXXXXXXLV

SEQ ID NO: 13231 - protein, 105 aa, Homo sapiens
  misc_feature (1)...(105): Xaa = X or * as defined in Table 2
MPLKKLPHLFVKGTPKXXXXXXXXXXXXXXXXXXXXXXXXXXXXXXXXXXXXXXXXXXXXXXXXXXXXXXXXXXXXXXXXXXXXXXXXXXXXXXXXXXXXXXXLV

SEQ ID NO: 13232 - protein, 65 aa, Homo sapiens
CLPRFMPILPASTSQVAGNTGAHHHARLIFVFLVEVGFHHVGQAGLLISLPQMIHPPRPPKVLGL

SEQ ID NO: 13233 - protein, 90 aa, Homo sapiens
  misc_feature (1)...(90): Xaa = X or * as defined in Table 2
LGLAQTILDNPLLGGEGLECAPTGPLEPPLAYTVNLILKSKARRTEPQKQYFSSHAKNGGXREGVAAXAPTGPLEPPLAYTVNLILKSKA

SEQ ID NO: 13234 - protein, 72 aa, Homo sapiens
ARPTFRLYLSLPVSQAGQQREAERHPRLVPTGPTHREPSPVRYDNLSRHIVDLSVAPRGEESRRCQGLVVHL

SEQ ID NO: 13235 - protein, 51 aa, Homo sapiens
  misc_feature (1)...(51): Xaa = X or * as defined in Table 2
NQTCVCWHACAYVSSNRVPWSIGSAIRSVCCYPLPFPALCAPCLXISTALD

SEQ ID NO: 13236 - protein, 179 aa, Homo sapiens
MYKYRPGYSSSSTSAAMPHSSSAKVLSTLRARLAQQREAERHPRLVPTGPTHREPSPVRYDNLSRHIVASLQEREKLLRQSPPLPGRPTAPYLGRSMSYSSQKAQPGVSETEEVALQPLLTPKDEVQLKTTYSKSNGQPKSLGSASPGPGQPPLSSPTRGGVKKLLTTEIASSAGAKCD

SEQ ID NO: 13237 - protein, 517 aa, Homo sapiens
  DOMAIN (62)..(104): Serpins proteins domain identified by eMATRIX, accession number BL00284C, p-value=6.400e-25, raw score of 28.56
  DOMAIN (6)..(121): Serpins (serine protease inhibitors) domain identified by PFam, accession name serpin, E-value=2.5e-42, PFam score of 145.7
MPYSLNLAIRDTFVNASRTLYSSSPRVLSNNSDANLELINTWVAKNTNNKISRLLDSLPSDTRLVLLNAIYLSAKWKTTFDPKKTRMEPFHFKNSVIKVPMMNSKKYPVAHFIDQTLKAKLSRGDSLKEPTSIAESSRHPSYRSEPSLEPESFRSPTFGKSFHFDPLSSGSRSSSLKSAQGTGFELGQLQSIRSEGTTSTSYKSLANQTRNGSLSYDSLLTPSDSPDFESVQAGPEPDPPLGYTSPFLSARLAQQREAERHPRLVPTGPTHREPSPVRYDNLSRHIVASLQEREKLLRQSPPLPGREEEPGLGDSGIQSTPGSGHAPRTSSSSDDSKRSPLGKTPLGRPAVPRFGKPDGLRGRGVGFPEPGPTAPYLGRSMSYSSQIAQPGVSETEEVDLRPLLTPKDEVQLKTTYSKSNGQPKSLGSASPGPGQPPLSSPTRGGVKKVSGVGGTTYEISEFDHHCPWVNNCIGRRNYRYFFLFLLSLTAHIMGVFGFGLLYVLYHIEELSGVRTAV

SEQ ID NO: 13238 - protein, 208 aa, Homo sapiens
TRREAERHPRLVPTGPTHREPSPVRYDNLSRHIVASLQEREKLLRQSPPLPGREEEPGLGDSGIQSTPGSGHAPRTSSSSDDSKRSPLGKTPLGRPAVPRFGKPDGLRGRGVGSPEPGPTAPYLGRSMSYSSQKAQPGVSETEEVALQPLLTPKDEVQLKTTYSKSNGQPKSLGSASPGPGQPPLSSPTRGGVKKVSGVGGTTYEISV

SEQ ID NO: 13239 - protein, 752 aa, Homo sapiens
  DOMAIN (370)..(392): KINESIN HEAVY CHAIN SIGNATURE domain identified by eMATRIX, accession number PR00380D, p-value=2.080e-22, raw score of 9.93
  DOMAIN (63)..(546): Kinesin motor domain identified by PFam, accession name kinesin, E-value=4.5e-117, PFam score of 402.3
PTWLERGGGEPAARPQTPQPTAPESRGPSGASALRCRGPTARSLPAASMLGAPDESSVRVAVRIRPQLAKEKIEGCHICTSVTPGEPQVFLGKDKAFTFDYVFDIDSQQEQIYIQCIEKLIEGCFEGYNATVFAYGQTGAGKTYTMGTGFDVNIVEEELGIISRAVKHLFKSIEEKKHIAIKNGLPAPDFKVNAQFLELYNEEVLDLFDTTRDIDAKSKKSNIRIHEDSTGGNLYCGRLPTRTVNTESEMMQCLKLGALSRTTASTQMNVQSSRSHAIFTIHVCQTRVCPQIDADNATDNKIISESAQMNEFETLTAKFHFVDLAGSERLKRTGATGERAKEGISINCGLLALGNVISALGDKSKRATHVPYRDSKLTRLLQDSLGGNSQTIMIACVSPSDRDFMETLNTLKYANRARNIKNKVMVNQAELVSKSMHFVVKSHDFRWSSWSTKPGKRIIDEEGVESINDMFHENAMLQTENNNLRVRIKAMQETVDALRSRITQLVSDQANHVLARAGEGNEEISNMIHSYIKEIEDLRAKLLESEAVNENLRKNLTRATARAPYFSGSSTFSPTILSSDKETIEIIDLAKKDLEKLKRKEKRKKKSVAGKEDNTDTDQEKKEEKGVSERENNELEVEESQEVSDHEDEEEEEEEEEDDIDGGESSDESDSESDEKANYQADLANITCEIAIKRKLIDELENSQKRLQTLKKQYEEKLMMLQHKIRDTQLERDQVLQNLCSVESYSEEKKKK

SEQ ID NO: 13240 - protein, 106 aa, Homo sapiens
  DOMAIN (77)..(102): Fibrinogen beta and gamma chains C-terminal domain proteins domain identified by eMATRIX, accession number BL00514H, p-value= 3.291e-13, raw score of 14.95
  DOMAIN (37)..(105): Fibrinogen beta and gamma chains, C-term domain identified by PFam, accession name fibrinogen_C, E-value=1.1e-16, PFam score of 60.5
  misc_feature (1)...(106): Xaa = X or * as defined in Table 2
EDQGLYSIRMEGARGCLAKSLALXGAGRGFYSGERTWTLSLPSGNCAPYQRGGWWSHAXAHSNLNGVWHHGGHYRSRYQDGVYWAEFRGGAYSLRKAAMLIRPLKL

SEQ ID NO: 13241 - protein, 297 aa, Homo sapiens
  DOMAIN (112)..(149): Fibrinogen beta and gamma chains C-terminal domain proteins domain identified by eMATRIX, accession number BL00514C, p-value= 8.059e-27, raw score of 17.41
  DOMAIN (85)..(297): Fibrinogen beta and gamma chains, C-term domain identified by PFam, accession name fibrinogen_C, E-value=1.6e-63, PFam score of 221.7
PFFCSTISYRLCPEGAAGQKKVLPPPPLVPVVPVRLVGSTRDTSRMRDPAPEPQRDQTQRQQEPMASPMPAGHPADPTKPVGPWQDCAEARQAGHEQSGVYELRVGRHVVSVWCEQQLEGGGWTVIQRRQDGSVNVFTSWQHYKAGFGRPDGEYWLGLEPEHHLTSRGDHELLVLKEDWGGRGARAHYDGFSLEPESDHYRLRLGQYHGDAGDSLSWHNDKPFSTVDRDRDSYSGNCALYQRRGWWYHACAHSNLNGVWHHGGHYRSRYQDGVYWAEFRGGAYSLRKAAMLIWPLKL

SEQ ID NO: 13242 - protein, 71 aa, Homo sapiens
KAVSLSVTQAGVQWLISLQSPPPRFNRFSCLSLPSSWDYRQVPPRPANFCIFSRDRVSPCWPGWSPTPNLK

SEQ ID NO: 13243 - protein, 97 aa, Homo sapiens
MVVSLYFPTHPDSFPVLLCLVLCPGRLILRDCNPPRLPFVIDFCLGLVNGMPWHSFGGKKREDNVFLHCSHSDLGYVLLAGTASLQDFSFFQKSPPP

SEQ ID NO: 13244 - protein, 2719 aa, Homo sapiens
  DOMAIN (2481)..(2526): Amino acid permeases proteins domain identified by eMATRIX, accession number BL00218D, p-value=8.043e-37, raw score of 21.49
  DOMAIN (1215)..(1561): Cell cycle protein domain identified by PFam, accession name FTSW_RODA_SPOVE, E-value=1e-80, PFam score of 281.6
MTKHYDYIAIGGGSGGIASINRAAMYGQKCALIEAKELGGTCVNVGCVPKKVMWHAAQIREAIHMYGPDYGFDTTINKFNWETLIASRTAYIDRIHTSYENVLGKNNVDVIKGFARFVDAKTLEVNGETITADHILIATGGRPSHPDIPGVEYGIDSDGFFALPALPERVAVVGAGYIAVELAGVINGLGAKTHLFVRKHAPLRSFDPMISENQSRSGAVRDEIQFYATGARPDLAKEMGFIGGKMPTHWGPHDGDAGIRKDAAMVADMRVKCAERCDRISLMHAGKVLASGTPQELVEKRGAASLEEAFIAYLQEAAGQSNEAEAPHRATAAAKRWNCDAIQYVRTLALMGTVILMLIMGYGISMMWKTCALKCWRDFCGSDFRLIKGTPRSSDDSIKILPPILKTSNSGPKGQQSSTKGNSSMATDSTQCVKKSRGRPKVFDRDAALDKAMKLFWQHGYEATSLADLVEATGAKAPTLYAEFTNKEGLFRAVLDRYIDRFAAKHEAQLFCEEKSVESALADYFAAIANCFTSKDTPAGCFMINNCTTLSPDSGDIANTLKSRHAMQERTLQQFLCQRQARGEIPPHCDVTHLAEFLNCIIQGMSISAREGASLEKLIAPEPRTPPASFRKLRTYPAATLSTGTAADEIYVWRGQTPFVMSIAATRQRSSHPTWFNGNTQHAPNFCRFARFAFSVERLGNRRAAFFDFTIRLRFRQNGVPNERFDVNVRSQLSSQALTTTRIPHTIRSASITKPLSQPSTCRDMSAAHRQAIADITPKYMEDLDQRWMDYGVKFLDKMAKSDKPFFLYYGTQFATFAPGCPARSSAWRLTSTISISGMELPMAPAFPIPRQNPWSMAPACLLTGTSGHNGGSGAKGEDRGVFGGRPPITEFPFGSTWNFRVCGLRSPVTALCRGEGGQPQGAQVQQRPGKITGENFRQGNSRGGHQNAQGHGHPLVQRHTGGPRHKKGATEHPGYTSAPANPSAELKIYDTSSQPLSQILSQVQQDGASIVVGPLLKNNVEELLKLSKALYNIDWHRHAQVKCNGLQINMLMAAAVCAVIASNLGMFVVMAEIMALCAQQQRGQLWFALGRLGTLLLAIACWLLWQRYGTLDLRLLDMRMQQLPLGSDIWLLGVIGFGLLAGIIPLHGWVPQAHANASAPAAALFSTVHVYKRVILTGDHITDSTSSQDEYNQPQVNISLDSAGGNIMSNFTKDNIGKPMATLFVEYKDSGKKDANGRAVLVKQEEVINIANIQSRLGNSFRITGINNPNEARQLSLLLRAGALIAPIQIVEERTIGPTLGMQNIRWGYGRSQPAELTKLSLFCYIANYLVRKGDEVRNNLRGFLKPMGVILVLAVLLLAQPDLGTVVVLFVTTLAMLFLAGAKLWQFIAIIGMGISAVVLLILAEPYRIRRVTAFWNPWEDPFGSGYQLTQSLMAFGRGELWGQGLGNSVQKLEYLPEAHTDFIFAIIGEELGYVGVVLALLMVFFVAFRAMSIGRKALEIDHRFSGFLACSIGIWFSFQALVNVRAGAGDVPTKYNSLSCFKETRNAILGRLMTPAHGHVWLDGEHIQHYASKEVARRIGLLAQNATTPGDITVQELVARGRYPHQPLFTRWRKEDEEAVTKAMQATGITHLADQSVIPFRSRLVKNRKAAWHSGSRDTAATLMLFVLGWLGRRRGLGCCGIWGGFSQQGLPPAMQKVMYKGLVPEDKTLREIKVTSGAKIMVVGSTINDVLAVNTPKDAAQQDAKAEENKKEPLCRQKLHCCLFTLVASIIVPAAFVLEDVDFDQMVSLEANRSSYNASFPSSFELSASSHSDDDVIIAKEGTSVSIECLLTASHYEDVHWHNSKGQQLDGRSRVIALVPVTPAIQPNARIRRHRVVAERQRQIGANFLRGKLTVIAAVVHIEAALEIIVHSQGNRFVEGQYQAVQHAVVRIPVGPGRGSGAGSLVAYALKITDLDPLEFDRATVRVLNGDNTRQIVFVRQMQVAHYAKCSFVRHADITNFSRALVLCQCVQRIQQRNRRRRIRPAITEFAEAVGRALRPVHLIKIEVNALSDGIVELCVGVGFAVLFILSGKSAKHRYHRKLGINRVNANCPGFYVNRILAPYINEAIRMLTQGERVEHIDAALVKFGFPVGPIQLLDEVGIDTGTKIIPVLEAAYGERFSAPANVVSSILNDDRKGRKNGRGFYLYGQKGRKSKKQVDPAIYPLIGTQGQGRISAPQVAERCVMLMLNEAVRCVDEQVIRSVRDGDIGAVFGIGFPPFLGGPFRYIDSLGAGEVVAIMQRLATQYGSRFTPCERLVEMGAPLDAASDSVRPLTTNGCDESRLMANWLKGQKVEIERVLVSPFLRAEQTLEEVGDCLNLPSSAEVLPELTPCGDVGLMWIGDKKQLLTPLRDQFTRAPLDNDIGVSEATRIDPNAWVERWKAAGHYQAEAALLQCTADTLADAVLITTAHAWQHQGKTLFISRKTYRIDALAVIMFSFGGLELIGITAAEARDPEKSIPKAVNQVVYRILLFYIGSLVVLLALYPWVEVKSNSSPFVMIFHNLDSNVVASALNFVILVASLSVYNSGVYSNSRMLFGLSVQGNAPKFLTRVSRRGVPINSLMLSGAITSLVVLINYLLPQKAFGLLMALVVATLLLNWIMICLAHLRFRAAMRRQGRETQFKALLYPFGNYLCIAFLGMILLLMCTMDDMRLSAILLPVWIVFLFMAFKTLRRK

SEQ ID NO: 13245 - protein, 76 aa, Homo sapiens
PQDEAPLVLLSKDVVVQGSAEATQVQEACGAGSEPHSHRNPGISAQVGLAPSYGAARGRRRPLALQQSPQERRHVG

SEQ ID NO: 13246 - protein, 55 aa, Homo sapiens
  misc_feature (1)...(55): Xaa = X or * as defined in Table 2
ARTLIEVIGLSHHNQKAHAMLLNAFXSSIRASPXRSGYXSSLWNQTSRFQIPAPT

SEQ ID NO: 13247 - protein, 540 aa, Homo sapiens
  DOMAIN (330)..(382): Ubiquitin domain proteins domain identified by eMATRIX, accession number BL00299, p-value=2.823e-10, raw score of 28.84
MGSRCLNPPPPAHSDTTGKDSFGNIRGAETGQGASACSVTSARVTCGAGSEPHSHRNPGISAQVGLAPSYGAARGRRRPLALQQSPQERRHVGWNSTRGLLPASLPGTASSQSASATASAALPLKVTGPLARNPTPPWTAAAALATRGQRPEKGLFPGPAPFSLGKRKRGRGRTWERRRRVSIETSTCFRPGCERLGAAAGANLSQLASSQRPLRERWVLYTIIMAAAGAPDGMEEPGMDTEAETVATEAPARPVNCLEAEATAGAGAGTVAEDSGTARGSLQPAPAPAQAPGDPVSQASVSNGEDSGGSADSELVDLRIIWNKTKHDVKFPLDSTGSELKQKIHSITGLPPAMQKVMYKGLVPEDKTLREIKVTSGAKIMVVGSTINDVLAVNTPKDAAQQDAKAEENKKEPLCRQKQHRKVLDKGKPEDVMPSVKGAQERLPTVPLSGMYNKSGGKVRLTFKLEQDQLWIGTKERTEKLPMGSIKNVVSDPIEGHEDYHNDGRFQLAPTEASYYWVYWVPTQYVDAIKDTVLGKWQYF

SEQ ID NO: 13248 - protein, 84 aa, Homo sapiens
  misc_feature (1)...(84): Xaa = X or * as defined in Table 2
MITSTSQTKGSSSPRISHSCPSSTAYVGRWRGPCGPGAQLPPNIGQPCPYPGPPLPSSYVYNNDQSVWXXXXXXXXXXXXXXXX

SEQ ID NO: 13249 - protein, 99 aa, Homo sapiens
  misc_feature (1)...(99): Xaa = X or * as defined in Table 2
XCVWHRRKVAVNLAKLKLFRHYYVMVICYVYFTRIIAILLQVAVPFQWQWLYQPTGNNPYLQLPQEDEEDVQMEQVMTDSGFREGLSKVNKTASGRELL

SEQ ID NO: 13250 - protein, 114 aa, Homo sapiens
  DOMAIN (74)..(96): Uracil-DNA glycosylase proteins domain identified by eMATRIX, accession number BL00130E, p-value=4.130e-09, raw score of 19.67
AAGIFWVSILCRNTYSVFKIHWLMAALAFTKSISLLFHSVRALDWGAAGGGLKGPPGPSPKSLQTLGLWEGHPPAIHVSTHFTSVASHPSPLSTSPAGQLCPPLSLGSAVTVRL

SEQ ID NO: 13251 - protein, 161 aa, Homo sapiens
FPVVWSIRHLQDASGTDGKVAVNLAKLKLFRHYYVMVICYVYFTRIIAILLQVAVPFQWQWLYQLLVEGSTLAFFVLTGYKFQPTGNNPYLQLPQEDEEDVQMEQVVCGEVEGVHVDQAPSSPGPRFPDKPIWKKSPFLPPNIGQPCPYPGTTPPFQLCVQ

SEQ ID NO: 13252 - protein, 833 aa, Homo sapiens
  DOMAIN (462)..(489): Anaphylatoxin domain proteins domain identified by eMATRIX, accession number BL01177E, p-value=1.346e-25, raw score of 20.64
  DOMAIN (448)..(769): Alpha-2-macroglobulin family domain identified by PFam, accession name A2M, E-value=5.1e-168, PFam score of 559.6
SGRRTPMASCRQRRCPFSSSTWSCPPASWPLASSGCPSSAGTRTASFKIHWLMAALAFTKSISLLFHSVRALDRGAAGAPITSFESHPPSSLFNFLTTHLMVTVRVPNPPPPPSASHPSVRLTVRLSIHPQINYYFINSQGHPIEGLAVMYYIAHLLKGALLFITIALIGSGWAFIKYVLSDKEKKVFGIVIPMQVLANVAYIIIESREEGASDYVLWKEILFLVDLICCGAILFPVVWSIRHLHGCVWHRRRMVAVNLAKLELFRHYYVMVGARLTHSGFGGITGLLHAHPSPSAAAPSRGPHPGSPARILQSSPMPARAPTVLAPRLLAPLQVICYVYFTRIIAILLQVAVPFQWQWLYQLLVEGSTLAFFVLTGYKFQPTGNNPYLQLPQEDEEDVQMEQVEAHTLKLLVKDIKSTVSNVFSEMKENMDKELKQIMRMIYERRICVADPFEVTVMQDFFIDLRLPYSVVRNEQVEIRAVLYNYRQNQELKVRVELLHNPAFCSLATTKRRHQQTVTIPPKSSLSVPYVIVPLRPACRKWKSRLLSTIISSVTVSGKGVQKEDIPPADLSDQVPDTESETRILLQGTPVAQMTEDAVDAERLKHLIVTPSGCGEQNMIGMTPTVIAVHYLDETEQWEKFGLEKRQGALELIKKGYTQQLAFRQPSSAFAAFVKRAPSTWLTAYVVKVFSLAVNLIAIDSQVLCGAVKWLILEKQKPDGVFQEDAPVIHQEMIGGLRNNNEKDMALTAFVLISLQEAKDICEEQVNIHNRYAATRQLMVAKISGKFSKMDKSKTAGLADCHSVLDVSNKGVLRDVASTSSGIVDWRGSQIQT

SEQ ID NO: 13253 - protein, 171 aa, Homo sapiens
  DOMAIN (8)..(40): Bacterial type II secretion system protein D proteins domain identified by eMATRIX, accession number BL00875A, p-value=6.447e- 09, raw score of 25.57
LRQPTRPVFGIVIPMQVLANVAYIIIESREEGASDYVLWKEILFLVDLICCGAILFPLVWSIRHLKDASGTDGKVPVNLPKLKLFRHYYVIPAPTPCAPLQVICYVYFTRIIANPLQVAVPFQWQWLYQLLVEGSTLAFFVLTGYKFQPTGNNPYLAVAPGGRGGCSRWSK

SEQ ID NO: 13254 - protein, 175 aa, Homo sapiens
  DOMAIN (59)..(73): LEUCINE-RICH REPEAT SIGNATURE domain identified by eMATRIX, accession number PR00019B, p-value=1.643e-12, raw score of 11.36
LSCRVQVSVAPPRPRPALPVSAVPGTPGTLTPALLHPWLADCDVSDSSCSSLAATLLANHSLRELDLSNNCLGDAGILQLVESVRQPGCLLEQLVYVQRAGRVVRPGLPREEGGGGGGHWAHASLLACVQPVRQFTGLRRWRTGLQGPGERTSTSLRGHLLRLFLLLAAALDDRP

SEQ ID NO: 13255 - protein, 111 aa, Homo sapiens
EKINDCAEVKQELAASDRERAQSRIQELEEKVASLLHQVSWRQDSREPDAGRIHAGSKTAKYLAADALELMVPGGWRPGTGSQQLEPPAEGGHPGAAQRGQGDLQCPHCLH

SEQ ID NO: 13256 - protein, 205 aa, Homo sapiens
  misc_feature (1)...(205): Xaa = X or * as defined in Table 2
WTRCWSRLRASGSSCEGRRAAPPRPRCARYEGGYQRSCGSESACGGRRVLGSSLRQHQGSCRNTRAGMFCGRQYIPHPSAASPRRPLGRSRNTQMGTPLSRVLLRSCRKKIDSLKQKVTHLRGLQIPHEPELMRKEISRLNKTVGRENKXLSRSEAGAGGLQEARDAALERVQMLEQQVSVPRAPDGTDQMSAGRWWPKSWDRLG

SEQ ID NO: 13257 - protein, 126 aa, Homo sapiens
MGQSQEVRVQGPCVWHWRRTRGPRLGQGWATVHLELDGEFAGAKCEAGREEHSALLLCDRLSALPLTPLDLLEKQVLEQGRAAVPRNAVLQGHSVVDDFSSAFSARGGQSVNELISLSSGVASAWV

SEQ ID NO: 13258 - protein, 219 aa, Homo sapiens
GSTKVHAETHALGCSVADSTSRTHQQLHRGAHWGEVGTHRWHTSVQSVIEKLQEENRLLKQKVTHVEDLNAKWQRYNASRDEYVRGLHAQLRGLQIPHEPELMRKEISRLNRQLEEKINDCAEVKQELAASRTARDAALERVQMLEQQILAYKDDFMSERADRERAQSRIQELEEKVASLLHQVSWRQDSREPDAGRIHAGSKTAKYLAADALELMVPG

SEQ ID NO: 13259 - protein, 89 aa, Homo sapiens
FFETESRSVARLECSGAISAYCTLCLPGSSDSIASASRVAGITGEHHHARLILVFLVEMGFHHVGQAGLGLLDLVIHPPRPPKVLGLQA

SEQ ID NO: 13260 - protein, 123 aa, Homo sapiens
DYSLGLPVVTTGCWGHMSNAPLRWALNPSYWGKNQLLCPESLALCCGLCCKPRFLEVTSVRSADLYLSSPCLVRRCPLFRGKEKPAVGMRMPDNKGWRRALSSSLSPRVPAPVAASVLTCVMN

SEQ ID NO: 13261 - protein, 22 aa, Homo sapiens
WSRSPDLMIRLPRPPKVLGLQA

SEQ ID NO: 13262 - protein, 85 aa, Homo sapiens
ADPPSPSFCFCFFFFETESCSVTRLECSGAILAHCNLCLPTCHHAWVIFVFLVETEFHHVGEDGLNLLNFMIYLPRPPKVLGLQA

SEQ ID NO: 13263 - protein, 136 aa, Homo sapiens
  DOMAIN (71)..(83): Sulfatases proteins domain identified by eMATRIX, accession number BL00523D, p-value=4.094e-11, raw score of 9.89
GFDEWFGSPNCHFGPYDNKARPNIPVYRDWEMVGRYYEEFPINLKTGEANLTQIYLQEALDFIKRQARHHPFFLYWAIDATHAPIYASKPFLGTSQRGRYGDAVREIDDFQFRLSFVHKEFPWTLIMREACSFLSL

SEQ ID NO: 13264 - protein, 7 aa, Homo sapiens
KKCLWSH

SEQ ID NO: 13265 - protein, 167 aa, Homo sapiens
RSEEQPQAGFVPGQDRLRKETRTAGLGARASGHRGVACRAAVGRRMRLGATRGHSPYSVLEGARLTKNFVKVVSVAAQNFRVSPRGVPEVSWVPVSRHLGHRPQFHPLKHGFDEWFGSPNCHFGPYDNKARPNIPVYRDWEMVGRYYEEFPINLKTGEANLTQIYLQ

SEQ ID NO: 13266 - protein, 578 aa, Homo sapiens
  DOMAIN (261)..(291): Sulfatases proteins domain identified by eMATRIX, accession number BL00523E, p-value=4.536e-22, raw score of 19.27
  DOMAIN (31)..(451): Sulfatase domain identified by PFam, accession name Sulfatase, E-value=9.1e-161, PFam score of 547.5
MAAVVAATRWWQLLLVLSAAGMGASGAPQPPNILLLLMDDMGWGDLGVYGEPSRETPNLDRMAAEGLLFPNFYSANPLCSPSRAALLTGRLPIRNGFYTTNAHARNAYTPQEIVGGIPDSEQLLPELLKKAGYVSKIVGKWHLGHRPQFHPLKHGFDEWFGSPNCHFGPYDNKARPNIPVYRDWEMVGRYYEEFPINLKTGEANLTQIYLQEALDFIKRQARHHPFFLYWAVDATHAPVYASKPFLGTSQRGRYGDAVREIDDSIGKILELLQDLHVADNTFVFFTSDNGAALISAPEQGGSNGPFLCGKQTTFEGGMREPALAWWPGHVTAGQVSHQLGSIMDLFTTSLALAGLTPPSDRAIDGLNLLPTLLQGRLMDRPIFYYRGDTLMAATLGQHKAHFWTWTNSWENFRQGIDFCPGQNVSGVTTHNLEDHTKLPLIFHLGWDPGERFPLSFASAEYQEALSRITSVVQQHQEALVPAQPQLNVCNWAVMNWAPPGCEKLGKCLTPPESIPKKCLWVPLAPAQTQARPRISSWPCKCLEEGWLWPRSSPNPAPSQTDSTCRRRGTCTISNLPRT

SEQ ID NO: 13267 - protein, 980 aa, Homo sapiens
  DOMAIN (220)..(240): SUBTILISIN SERINE PROTEASE FAMILY (S8) SIGNATURE domain identified by eMATRIX, accession number PR00723A, p-value=8.714e- 18, raw score of 13.37
  DOMAIN (184)..(508): Subtilase family domain identified by PFam, accession name Peptidase_S8, E-value=3.8e-153, PFam score of 522.2
AALKGGTPPPGALAARAPREPVAAMPPRAPPAPGPRPPPRAAAATDTAAGAGGAGGAGGAGGPGFRPLAPRPWRWLLLLALPAACSAPPPRPVYTNHWAVQVLGGPAEADRVAAAHGYLNLGQIGNLEDYYHFYHSKTFKRSTLSSRGPHTFLRMDPQVKWLQQQEVKRRVKRQVRSDPQALYFNDPIWSNMWYLHCGDKNSRCRSEMNVQAAWKRGYTGKNVVVTILDDGIERNHPDLAPNYDSYASYDVNGNDYDPSPRYDASNENKHGTRCAGEVAASANNSYCIVGIAYNAKIGGIRMLDGDVTDVVEAKSLGIRPNYIDIYSASWGPDDDGKTVDGPGRLAKQAFEYGIKKGRQGLGSIFVWASGNGGREGDYCSCDGYTNSIYTISVSSATENGYKPWYLEECASTLATTYSSGAFYERKIVTTDLRQRCTDGHTGTSVSAPMVAGIIALALEANSQLTWRDVQHLLVKTSRPAHLKASDWKVNGAGHKVSHFYGFGLVDAEALVVEAKKWTAVPSQHMCVAASDKRPRSIPLVQVLRTTALTSACAEHSDQRVVYLEHVVVRTSISHPRRGDLQIYLVSPSGTKSQLLAKRLLDLSNEGFTNWEFMTVHCWGEKAEGQWTLEIQDLPSQVRNPEKQGKLKEWSLILYGTAEHPYHTFSAHQSRSRMLELSAPELEPPKAALSPSQVEVPEDEEDYTGVCHPECGDKGCDGPNADQCLNCVHFSLGSVKTSRKCVSVCPLGYFGDTAARRCRRCHKGCETCSSRAATQCLSCRRGFYHHQEMNTCVTLCPAGFYADESQKNCLKCHPSCKKCVDEPEKCTVCKEGFSLARGSCIPDCEPGTYFDSELIRCGECHHTCGTCVGPGREECIHCAKNFHFHDWKCVPACGEGFYPEEMPGLPHKVCRRCDENCLSCAGSSRNCSRCKTGFTQLGTSCITNHTCSNADETFCEMVKSNRLCERKLFIQFCCRTCLLAG

SEQ ID NO: 13268 - protein, 59 aa, Homo sapiens
  DOMAIN (1)..(29): Elongation factor Tu family domain identified by PFam, accession name GTP_EFTU, E-value=0.023, PFam score of 10.6
  misc_feature (1)...(59): Xaa = X or * as defined in Table 2
MPLRLPIQDVYXIGGIGTALVGRVESGAVNYGLVGSSVHXAVQSVALDFRFNSWMLYSQ

SEQ ID NO: 13269 - protein, 1025 aa, Homo sapiens
  DOMAIN (252)..(272): SUBTILISIN SERINE PROTEASE FAMILY (S8) SIGNATURE domain identified by eMATRIX, accession number PR00723A, p-value=8.714e- 18, raw score of 13.37
  DOMAIN (216)..(540): Subtilase family domain identified by PFam, accession name Peptidase_S8, E-value=3.8e-153, PFam score of 522.2
GNAPRPPPPPRLPPAAVLAAAVAAAAALPRRGAALKGGTPPPGALAARAPREPVAAMPPRAPPAPGPRPPPRAAAATDTAAGAGGAGGAGGAGGPGFRPLAPRPWRWLLLLALPAACSAPPPRPVYTNHWAVQVLGGPAEADRVAAAHGYLNLGQIGNLEDYYHFYHSKTFKRSTLSSRGPHTFLRMDPQVKWLQQQEVKRRVKRQVRSDPQALYFNDPIWSNMWYLHCGDKNSRCRSEMNVQAAWKRGYTGKNVVVTILDDGIERNHPDLAPNYDSYASYDVNGNDYDPSPRYDASNENKHGTRCAGEVAASANNSYCIVGIAYNAKIGGIRMLDGDVTDVVEAKSLGIRPNYIDIYSASWGPDDDGKTVDGPGRLAKQAFEYGIKKGRQGLGSIFVWASGNGGREGDYCSCDGYTNSIYTISVSSATENGYKPWYLEECASTLATTYSSGAFYERKIVTTDLRQRCTDGHTGTSVSAPMVAGIIALALEANSQLTWRDVQHLLVKTSRPAHLKASDWKVNGAGHKVSHFYGFGLVDAEALVVEAKKWTAVPSQHMCVAASDKRPRSIPLVQVLRTTALTSACAEHSDQRVVYLEHVVVRTSISHPRRGDLQIYLVSPSGTKSQLLAKRLLDLSNEGFTNWEFMTVHCWGEKAEGQWTLEIQDLPSQVRNPEKQGKLKEWSLILYGTAEHPYHTFSAHQSRSRMLELSAPELEPPKAALSPSQVEVPEDEEDYTAQSTPGSANILQTSVCHPECGDKGCDGPNADQCLNCVHFSLGSVKTSRKCVSVCPLGYFGDTAARRCRRCHKGCETCSSRAATQCLSCRRGFYHHQEMNTCVTLCPAGFYADESQKNCLKCHPSCKKCVDEPEKCTVCKEGFSLARGSCIPDCEPGTYFDSELIRCGECHHTCGTCVGPGREECIHCAKNFHFHDWKCVPACGEGFYPEEMPGLPHKVCRRCDENCLSCAGSSRNCSRCKTGFTQLGTSCITNHTCSNADETFCEMVKSNRLCERKLFIQFCCRTCLLAG

SEQ ID NO: 13270 - protein, 1066 aa, Homo sapiens
  DOMAIN (300)..(320): SUBTILISIN SERINE PROTEASE FAMILY (S8) SIGNATURE domain identified by eMATRIX, accession number PR00723A, p-value=8.714e- 18, raw score of 13.37
  DOMAIN (264)..(590): Subtilase family domain identified by PFam, accession name Peptidase_S8, E-value=2.5e-148, PFam score of 506.1
AGRGRLWGGTASREPQKSAGKFPRWGAFRASRTALGPGARSQERGPGGGNAPRPPPPPRLPPAAVLAAAVAAAAALPRRGAALKGGTPPPGALAARAPREPVAAMPPRAPPAPGPRPPPRAAAATDTAAGAGGAGGAGGAGGPGFRPLAPRPWRWLLLLALPAACSAPPPRPVYTNHWAVQVLGGPAEADRVAAAHGYLNLGQIGNLEDYYHFYHSKTFKRSTLSSRGPHTFLRMDPQVKWLQQQEVKRRVKRQVRSDPQALYFNDPIWSNMWYLHCGDKNSRCRSEMNVQAAWKRGYTGKNVVVTILDDGIERNHPDLAPNYDSYASYDVNGNDYDPSPRYDASNENKHGTRCAGEVAASANNSYCIVGIAYNAKIGGIRMLDGDVTDVVEAKSLGIRPNYIDIYSASWGPDDDGKTVDGPGRLAKQAFEYGIKKGRQGLGSIFVWASGNGGREGDYCSCDGYTNSIYTISVSSATENGYKPWYLEECASTLATTYSSGAFYERKIVTTDLRQRCTDGHTGTSVSAPMVAGIIALALEANSQLTWRDVQHLLVKTSRPAHLKASDWKVNGAGHKFSHFYGFGSVDAKSLGEEAKKWTAGPSQHMWVAASDKRPRSIPLVQVLRTTALTSACAEHSDQRVVYLEHVAVRTSISHPRRGDLQIYLVSPSGTKSQLLAKRLLDLSNEGLTNGEFMTAHCWGEKAEGQWTLEIQDLPSQVRNPEKQGKLKEWSLILYGTAEHPYHTFSAHQSRSRMLELSAPELEPPKAALSPSQVEVPEDEEDYTGVCHPECGDKGCDGPNADQCLNCVHFSLGSVKTSRKCVSVCPLGYFGDTAARRCRRCHKGCETCSSRAATQCLSCRRGFYHHQEMNTCVTLCPAGFYADESQKNCLKCHPSCKKCVDEPEKCTVCKEGFSLARGSCIPDCEPGTYFDSELIRCGECHHTCGTCVGPGREECIHCAKNFHFHDWKCVPACGEGFYPEEMPGLPHKVCRRYGPPGGERQATVSSKGVPGGQSLSASSPGAGEGMLHHPTVDRSPFTELLRGLRPFVHWMHICWVPAVGRHRAAAG

SEQ ID NO: 13271 - protein, 999 aa, Homo sapiens
  DOMAIN (220)..(240): SUBTILISIN SERINE PROTEASE FAMILY (S8) SIGNATURE domain identified by eMATRIX, accession number PR00723A, p-value=8.714e- 18, raw score of 13.37
  DOMAIN (184)..(508): Subtilase family domain identified by PFam, accession name Peptidase_S8, E-value=3.8e-153, PFam score of 522.2
AALKGGTPPPGALAARAPREPVAAMPPRAPPAPGPRPPPRAAAATDTAAGAGGAGGAGGAGGPGFRPLAPRPWRWLLLLALPAACSAPPPRPVYTNHWAVQVLGGPAEADRVAAAHGYLNLGQIGNLEDYYHFYHSKTFKRSTLSSRGPHTFLRMDPQVKWLQQQEVKRRVKRQVRSDPQALYFNDPIWSNMWYLHCGDKNSRCRSEMNVQAAWKRGYTGKNVVVTILDDGIERNHPDLAPNYDSYASYDVNGNDYDPSPRYDASNENKHGTRCAGEVAASANNSYCIVGIAYNAKIGGIRMLDGDVTDVVEAKSLGIRPNYIDIYSASWGPDDDGKTVDGPGRLAKQAFEYGIKKGRQGLGSIFVWASGNGGREGDYCSCDGYTNSIYTISVSSATENGYKPWYLEECASTLATTYSSGAFYERKIVTTDLRQRCTDGHTGTSVSAPMVAGIIALALEANSQLTWRDVQHLLVKTSRPAHLKASDWKVNGAGHKVSHFYGFGLVDAEALVVEAKKWTAVPSQHMCVAASDKRPRSIPLVQVLRTTALTSACAEHSDQRVVYLEHVVVRTSISHPRRGDLQIYLVSPSGTKSQLLAKRLLDLSNEGFTNWEFMTVHCWGEKAEGQWTLEIQDLPSQVRNPEKQGKLKEWSLILYGTAEHPYHTFSAHQSRSRMLELSAPELEPPKAALSPSQVEVPEDEEDYTAQSTPGSANILQTSVCHPECGDKGCDGPNADQCLNCVHFSLGSVKTSRKCVSVCPLGYFGDTAARRCRRCHKGCETCSSRAATQCLSCRRGFYHHQEMNTCVTLCPAGFYADESQKNCLKCHPSCKKCVDEPEKCTVCKEGFSLARGSCIPDCEPGTYFDSELIRCGECHHTCGTCVGPGREECIHCAKNFHFHDWKCVPACGEGFYPEEMPGLPHKVCRRYGPPGGERQATVSSKGVPGGQSLSASSPGAGEGMLHHPTVDRSPFTELLRGLRPFVHWMHICWVPAVGRHRAAAG

SEQ ID NO: 13272 - protein, 393 aa, Homo sapiens
  DOMAIN (211)..(350): Proprotein convertase P- domain identified by PFam, accession name P, E-value=2e-49, PFam score of 177.6
MEVSRAGLSTVLEAVLCPADLTAASLDAASPMPSSSHLPVLGYPVGKSGARPGSTQEVVLTAAAVTQEVVLTAAAVTQEVVLTAAAVTQEVVLTAAAVTQEVVLTAAAVTQEVVLTAAAVTQEVVLTAAAVTQEVVLTAAAVTQEVVLTAAAVTQEVVLTTAGAENKPVSAPHSSSTCARTGSPGRPLHTQSPPRGHILFGKEKVCYKFKHDILKHLLTQLTVDGIVSIPLVQVLRTTALTSACAEHSDQRVVYLEHVVVRTSISHPRRGDLQIYLVSPSGTKSQLLAKRLLDLSNEGFTNWEFMTVHCWGEKAEGQWTLEIQDLPSQVRNPEKQGDVFCTKCHSHQSFEESQDTKSVVAWEGWGCTHGVHCEVPKNLGIRSGKHHPLKIKLV

SEQ ID NO: 13273 - protein, 217 aa, Homo sapiens
RSAFELWTQEGGLPSPSGWVIIQSLKNLNRTDSRGRRSSPLISCLATGAGTSRHLLPLDWMSTIGCPGSQASRPELSLNHTSGFPGFPAFHPRWWAFSGPQSHINQIPHPKSPLCVGSLLQRAYTNTLPLFPLQFLRSPTKESTYSQLHPSGSPPGGGPGPRQLGLTSPKASEQPLPGFDWEGQGSDRRAGADGSGRESSGTPGTAVLQRSSCGTSC

SEQ ID NO: 13274 - protein, 289 aa, Homo sapiens
  DOMAIN (65)..(117): Xanthine/uracil permeases family proteins domain identified by eMATRIX, accession number BL01116C, p-value=1.871e-09, raw score of 28.96
  DOMAIN (1)..(197): Sulfate transporter family domain identified by PFam, accession name Sulfate_transp, E-value=2.8e-05, PFam score of -36.0
AAEGLPPVRIPPFSETTANGTISFTEMVQDMGAGLAVVPLMGLLESIAVAKAFASHNNYRIDANQELLAIGLTNMLGSLVSSYPVTGSFGRTAVNAQSGVCTPAGGLVTGVLVLLSLDYLTSLFYYIPKSALGAVIIMGRGPAVSTPRSFRNALGFLKRLDLLPLCVTFLLCFWEEQDGILAGALGSLLMLLHSAARPETKGSEGPVLVLQPASGLSFPAMEALREEILSRALEVSPPRCLVLECTHVCSIDYTVVLGLGELLQDFQKQGVALAFEGLQVPRLRVLLSR

SEQ ID NO: 13275 - protein, 84 aa, Homo sapiens
HASGMKNDLVYTGVDPETLPNRNGDGVPTGLSPDPQFRTRKIQASLLTLEETMKQLEELEEEFRRLKPLLANLGGNSVPHPGCT

SEQ ID NO: 13276 - protein, 654 aa, Homo sapiens
  DOMAIN (542)..(583): PROTEIN GTPASE DOMAIN ACTIVATION domain identified by eMATRIX, accession number PD00930B, p-value=7.000e-17, raw score of 33.72
  DOMAIN (415)..(591): RhoGAP domain identified by PFam, accession name RhoGAP, E- value=1.2e-35, PFam score of 131.9
MAEPLLRKTFSRLRGREKLPRKKSDAKERGHPAQRPEPSPPEPEPQAPEGSQAGAEGPSSPEASRSPARGAYLQSLEPSSRRWVLGGAKPAEDTSLGPGVPGTGEPAGEIWYNPIPEEDPRPPAPEPPGPQPGSAESEGLAPQGAAPASPPTNSLPHQVPGPRQAPLHKDEEAAGTAAPPEPARPPGWQGAREGCPCGLRHQPLPPGQQRGGPRAGSRAWGHPEPEGRLPQRRGLTGAPSWAPITHLLPALRGGSRSPGTPGRTLGPPQPAPVRSRGAAASAGGHPQGPLLPTASGWGGQGPNRATARGAGLPAAGPHLPPGAGGRQAPARPGACVGPWREKAPALCPGHRAAAHGLPRCQAQQLAVRLEPQGLLYAKLTLSEQQEAPATAEPRVFGLPLPLLVERERPPGQVPLIIQKCVGQIERRGLRVVGLYRLCGSAAVKKELRDAFERDSAAVCLSEDLYPDINVITAVPSLALEASGALTRGDPVFTGILKDYLRELPTPLITQPLYKVVLEAMARDPPNRVPPTTEGTRGLLSCLPDVERATLTLLLDHLRLVSSFHAYNRMTPQNLAVCFGPVLLPARQAPTRPRARSSGPGLASAVDFKHHIEVLHYLLQSWPIPACPDNLQMSRLTCDPNDSHLCTCRWQTPKW

SEQ ID NO: 13277 - protein, 26 aa, Homo sapiens
WCDLGSLQPPPPRFKQFSCLSLPRHS

SEQ ID NO: 13278 - protein, 115 aa, Homo sapiens
FFFFFFFFLETASHSVAQAGGQGHDLSSLQPPPPRFKQFSCLSLPSSWDHRHKPPHPPNFVFLVETGFHHVGQAGLELLTSSDPPASASQMAGITGVSHCAWPITIFKQSNYGML

SEQ ID NO: 13279 - protein, 93 aa, Homo sapiens
  misc_feature (1)...(93): Xaa = X or * as defined in Table 2
DSRCPGAMACALRAPPRITNPVSAQWDPETGSVAGEPWIWTQRERNQSALQRGNVPFCRCRDHEFTLDLGGQGGQITXGQEFETSLANMAKPH

SEQ ID NO: 13280 - protein, 259 aa, Homo sapiens
FNFVGRILGPRGLTAKQLEAETGCKIMVRGKGSMRDKKKEEQNRGKPNWEHLNEDLHVLITVEDAQNRAEIKLKRAVEEVKKLLVPAAEGEDSLKKMQLMELAILNGTYRDANIKSPALAFSLAATAQAAPRIITGPAPVLPPAALRTPTPAGPTIMPLIRQIQTAVMPNGTPHPTAAIVPPGPEAGLIYTPYEYPYTLAPATSILEYPIEPSGVLGAVATKVRRHDMRVHPYQRIVTADRSRHRQLTYDLLTSELFTQ

SEQ ID NO: 13281 - protein, 70 aa, Homo sapiens
HPTAAIVPPGPEAGLIYTPYEYPYTLAPATSILEYPIEPSGVLVWLSQRKAKNSRTVLTEPSSDLNLTNA

SEQ ID NO: 13282 - protein, 143 aa, Homo sapiens
EPFPGGDCIPRATLESCRSMIALMDTVGSGKLNLQEFHHLWNKIKGWQKIFKHYDTDQSGHHQTATKMRNAVNTDAGFHLNNQLYDIITMRYADKHMNIDFDSFICCFVRLEGMFRAFHAFDKDGDGIIKLNVLEWLQLTMYA

SEQ ID NO: 13283 - protein, 112 aa, Homo sapiens
GKPTLREFTHLWDKIKGWREIFNNITPSQSGTITGYEMRNAVNDAGFHLNNPLYDIITSRTADNHMNIDFESFICCFVRLEGMFRAFHAFDKDGDGIIRLNVLEWLQLTMYA

SEQ ID NO: 13284 - protein, 1288 aa, Homo sapiens
PSASDQSTWYLDESTLTDNIKKTLHKFCGPSPVVFSDVNSMYLSSTEPPAAAEWACLLRPLRGREPEGVWNLLSIVREMFKRRDSNAAPLLEILTDQCLTYEQITGWWYSVRTSASHSSASGHTGRSNGQSEVAAHACASMCDEMVTLWRLAVLDPALSPQRRRELCTQLRQWQLKVIENVKRGQHKKTLERLFPGFRPAVEACYFNWEEAYPLPGVTYSGTDRKLALCWARALPSRPGASRSGGLEESRDRPRPLPTEPAVRPKEPGTKRKGLGEGVPSSQRGPRRLSAEGGDKALHKMGPGGGKAKALGGAGSGSKGSAGGGSKRRLSSEDSSLEPDLAEMSLDDSSLALGAEASTFGGFPESPPPCPLHGGSRGPSTFLPEPPDTYEEDGGVYFSEGPEPPTASVGPPGLLPGDVCTQDDLPSTDESGNGLPKTKEAAPAVGEEDDDYQAYYLNAQDGAGGEEEKAEGGAGEEHDLFAGLKPLEQESRMEVLFACAEALHAHGYSSEASRLTVELAQDLLANPPDLKGKKNKVSTSRQTWVATNTLSKAAFLLTVLSERPEHHNLAFRVGMFALELQRPPASTKALEVKLAYQESEVAALLKKIPLGPSEMSTMRCRAEELREGTLCDYRPVLPLMLASFIFDVLCAPGSRPPSRNWNSETPGDEELGFEAAVAALGMKTTVSEAEHPLLCEGTRREKGDLALALMITYKDDQAKLKKILDKLLDRESQTHKPQTLSSFYSSSRPTTASQRSPSKHGGPSAPGALQPLTSGSAGPAQPGSVAGAGPGPTEGFTEKNVPESSPHSPCEGLPSEAALTPRPEGKVPSRLALGSRGGYNGRGWGSPGRPKKKHTGMASIDSSAPETTSDSSPTLSRRPLRGGWAPTSWGRGQDSDSISSSSSDSLGSSSSSGSRRASASGGARAKTVEVGRYKGRRPESHAPHVPNQPSEAAAHFYFELAKTVLIKAGGNSSTSIFTHPSSSGGHQGPHRNLHLCAFEIGLYALGLHNFVSPNWLSRTYSSHVSWITGQAMEIGSAALTILVECWDGHLTPPEVASLADRASRARDSNMVRAAAELALSCLPHAHALNPNEIQRALVQCKEQDNLMLEKACMAVEEAAKGGGVYPEVLFEVAHQWFWLYEQTAGGSSAAREGATSCSASGIRAGGEAGRGMPEGRGGPGTEPVTVAAAAVTAAATVVPVISVGSSLYPGPGLGHGHSPGLHPYTALQPHLPCSPQYLTHPASPLPTPWPHMPRPAVFPVPSSAYPQGVHPAFLWGPGGIPGPAPTPSY

SEQ ID NO: 13285 - protein, 65 aa, Homo sapiens
NRNNPFYNSGSSNFLENSIWSHQLSLLWKLNSLSLSLSLSCFTAKLGDTKELEAFIADLDKTLAK

SEQ ID NO: 13286 - protein, 115 aa, Homo sapiens
AAAEDLSDALCEFDAVLADFASPFHERHFHYEEHLERMKRRSSASVSDSSGFSDSESADSLYRNSFSFSDEKLNSPTDSTPALLSATVTPQKAKLGDTKELEAFIADLDKTLASM

SEQ ID NO: 13287 - protein, 32 aa, Homo sapiens
TFERKWGSKNLHSCNGWSWKGVLLEISQQFSE

SEQ ID NO: 13288 - protein, 94 aa, Homo sapiens
ASSLHSVSSKSFRDFLLEEKKSVTSHSSGDHVKKVSFKGIENSQAPKIVSPWLSSSVTAPSMVAPVTFASIVEEELQQEAALIRSREKPLALIQ

SEQ ID NO: 13289 - protein, 61 aa, Homo sapiens
PSKAPKPVNAWASSLHSVSSKSFRDFLLEEKKSVTSHSSGDHVKKVSFKGIENSQAPKIVR

SEQ ID NO: 13290 - protein, 55 aa, Homo sapiens
  misc_feature (1)...(55): Xaa = X or * as defined in Table 2
NFASDDKFSLPXDYTTFKVNWPGAVAHAXNPSNLGGQGGQITXGQEFETSLANMA

SEQ ID NO: 13291 - protein, 401 aa, Homo sapiens
  misc_feature (1)...(401): Xaa = X or * as defined in Table 2
KMEISSLKEEINMEPNHSETMFKKAKTKAKKKPRKRSDSSGGYNLSDIIQSPSSTGLLKSGKTNSVESLPELLTSDSEGSYAGVGSPRDLQSPDFTTGFHSDKIEAKVKPYVNGTSPVYSREDLKPWEKSPILKISAPQPIPSNRIDTTSSASWVAGSFSPVSPPVVDLRTIMEIEESRQKCGATPKSHLGKTVSHGVKLSQKQRKMIALTTKDNNSGLNSMQTVICIPSDAPXTVNEXGSSLHSVSSKSFRDFLLEEKKSVTSHSSGDHVKKVSFKGIENSQAPKIVRCSTHGTPGPEGNHISDLPLLDSPNPWLSSSVTTPSMVAPVTFASIVGRGTSTKEAALIRSREKPLALIQIEEHAIQDLLVFYEAFGNPEEFVIVERTPQGPLAVPMWNKHGC

SEQ ID NO: 13292 - protein, 24 aa, Homo sapiens
LLPQFQSLFLVYSEIQLLPGLVFC

SEQ ID NO: 13293 - protein, 294 aa, Homo sapiens
  DOMAIN (217)..(237): kw TRANSCRIPTASE REVERSE II ORF2 domain identified by eMATRIX, accession number DM01354U, p-value=5.696e-19, raw score of 12.24
  misc_feature (1)...(294): Xaa = X or * as defined in Table 2
TEVPGVHSENDKNQKKKIRKLDPKKKQVDTVQIIQGSKKGSSFLIFFFSPLIILTVELQVGNVVAQELSIQLELFWRTRASQSVTEPTAGLCLLNPGEQEMRALRGRRKPLLLIPSKQDLEWTSSKLQQTCSXGFXRXKENXQTERTSTPKPHLVGSSGQGNQAGEGNKGYPVRKRGSQIVPVCRXHDCISRKPHCLNPKYSLSXXATAAKSQDTKFNVQKSQAFLYTNNKQTDSQIMSELPFTIASKRIKYLSNPTYKGCEGPLQGKLQTIAQRNKTEPNKWKNIPVMGEEPM

SEQ ID NO: 13294 - protein, 652 aa, Homo sapiens
  DOMAIN (483)..(524): kw TRANSCRIPTASE REVERSE II ORF2 domain identified by eMATRIX, accession number DM01354I, p-value=1.000e-40, raw score of 15.55
  DOMAIN (264)..(469): AP endonuclease family 1 domain identified by PFam, accession name AP_endonucleas1, E-value=0.018, PFam score of -79.5
MPPHSEQPHSPSTRQKRKVPLFVRQCPSFVIQAPKAKMDTFDGRKKQFTRFLFLFSMDQLGQGRFSMQTLSFALAVYRKDSPLVACQVQALGNLEPSSVEAHVSSHGIAIDRKGWHVSLFSIQPGDCFPKALVEDSPRDRARRQQSSKEEGWCRDRRRLKFHSKKGAAAIVVKSKKYESPSFGVCFESLLNPPRLTSRREKTISSSKRCRQCHAEETTVVFWAKESQTGEQTGRGAGQRRMGMIICKACSMLPAERQDLRPTSLVISHGVSVKDRREHCQCPNYYPPLRNMSPLEHSIKICGGKKPQNDSQRITTITKVIVNQDFKQPDDTELSQGSRKETSEASLVTLLWELVTAGQTPPLVTPRQTGSGVDLQQTPTDLQLRVLTIRRKTNKQKGHPPKPHLYVTIIKDQRTLHPKSTEYTFFSAPHPTYSKIDHIVGSKALLSKCKRTEIITNCLSDHSAIKLELRIKKLTQNRSTTWKLNNLLLNDYWVYKEMKAEIKMFFETNENKDTTYQNLWDTFKAMYSGKFMALNAHKRKQQRSKIDTLISQLTELEKQEQTHSKASRRQETTKIRAELKEIETQKTLQKINESRSWFFEKINKIDRTLARLIKKKREKNQIDTIKKIKVISPPIPQKYKLLFILFGTGTQIN

SEQ ID NO: 13295 - protein, 522 aa, Homo sapiens
  DOMAIN (344)..(384): kw TRANSCRIPTASE REVERSE II ORF2 domain identified by eMATRIX, accession number DM01354Y, p-value=1.000e-40, raw score of 10.69
  misc_feature (1)...(522): Xaa = X or * as defined in Table 2
CPSVGFSLQAGVVFGCKLLTAKDFXQQTQGFSQRLSQLHTHGHRALQKKAISSKNEFTIMGQISEATSALFGEKESKEATLRGEGARNRDDRVDSNCRLQPPGQDGDEGQKVPVKYSAGDTQANRVWSGLQQTPTDLQLRVLTVRRKTNKQKGHPHQNPICTSASSKTKEIQTTIREYHKNLYANKLENLEEMDKFLDTYTLPRLNQEEVESLNRPITGSKIEAIINSLPTKKSPGPDAFTAEFYQRYKEELRIKYLGIQLTRDVKDLFKENYKPLLNEIKGHKQMEEHSMLMDRKNQYCENGHTAQELEKTALKFIWNQKRAHIAKTILSQKNKAGGIILPDFKLYYKATVTKTAWYRYQNRDIDQWNRTEPPEIIPHIYNHLIFDKPDKNEKWGKDPLFNKWYWENWLAICRKLKLDSFLTPYTKINSRWIKDLNGRPKTIKTLEENLGNTIQDIGMGKDFMTKTPKAMATKAKVGKWDLIKLKSFCTAKETTIRVNRQPTEWEKIFAIYPSDKGLISRI

SEQ ID NO: 13296 - protein, 636 aa, Homo sapiens
  DOMAIN (142)..(188): kw TRANSCRIPTASE REVERSE II ORF2 domain identified by eMATRIX, accession number DM01354O, p-value=1.000e-40, raw score of 8.73
  DOMAIN (180)..(428): Reverse transcriptase domain identified by PFam, accession name rvt, E-value=7.7e-11, PFam score of 49.4
  misc_feature (1)...(636): Xaa = X or * as defined in Table 2
EKTKSASDWCTXKXRGDGTKLENTLQDIIQDNFPNLGRQANIQIQEIQIMPQRYSSRRATPRHIIVRFTKVKMKEKILRAAREKEIQTTISEYYKHLYANKLENLEEMGKLLDTYTLPRQNQEEVESLNRPIAGSEIEAIINSLPTKKSPGPDGFTAKFYQRHKEELVPFLLKQFQSMEKEVILPNSFYEASIILIPKPGRDTTEKENFTPISLMIIDAKILNKILANRIQQHIKKLIHQDQVGFISGMQGWFNEHKSVNVIHHINRTKDRNHMIISVDAEKAFNKIQQPFMLKTLNKLGIQLTRDVKDPFKENYKPLLNEIKEDTNKWKNIPYSWIGRINIVEIAILPKVSLERERQHDQTHVQSQLEKLDLLEQEYNKLTTMQALAEKKMQELEAKLHEEEQERKRMQAKAAEHPRLCLYLAAIFSALKNLQDKIRRLELERIQAEESVKTLSRETIEYKKVLDEQIQERENSKNEESKHNQELTSQLLAAENKCNLLEKQLEYMRNMIKHAEMERTSVLEKQTPLLIPRQRGSRVDLQQTPTDLQLRVLTVRRKTNKQKGHPHQNPICMSPSSKTKEERSSSPTTERSWTENDFDELREEGFRRSNYSELKEELQTHGKEVKNLEKKIRRMAN

SEQ ID NO: 13297 - protein, 330 aa, Homo sapiens
  DOMAIN (42)..(88): kw TRANSCRIPTASE REVERSE II ORF2 domain identified by eMATRIX, accession number DM01354O, p-value=1.000e-40, raw score of 8.73
  DOMAIN (77)..(303): Reverse transcriptase domain identified by PFam, accession name rvt, E-value=1.1e-09, PFam score of 45.6
  misc_feature (1)...(330): Xaa = X or * as defined in Table 2
TRKSRRNGXIPGHIHPPKTKQEEAESLNRPITGSEIEAIINSLPTKKSPGTDGFTAKFYQRYKEELVPFLLKLFQSIEKEEILPNSFYEASIILIPKPDRDTTKKENFRPISPMNIDAKTLNKTLANRIQQHIKKLIHHDQVGFIHCNARLVQHMQINKRNPAYKXNQRQKPHDYLNRCRKGLXQNSTALHAKTSQXISVGSSGQGNQAGEGNKGYSIRKRGSQMSLFAEDVIVYLENPIVSDQNLLKLISNFSKVSGYKINVLNSQAFLYTNNRQTESQIMSEVPFTIASKRIKYLGIQLTRDVKDLFKENYKPLLKEIKEDTTFHAHG

SEQ ID NO: 13298 - protein, 30 aa, Homo sapiens
VGEVLLDNILWSLMMVTYRWGFAVDVLSVC

SEQ ID NO: 13299 - protein, 78 aa, Homo sapiens
  DOMAIN (3)..(49): DEAD-box subfamily ATP-dependent helicases proteins domain identified by eMATRIX, accession number BL00039D, p-value=6.167e- 21, raw score of 21.67
REVLITTNVCARGIDVKQVTIVVNFDLPVKQGEEPDYETYLHSIGRTGRFGKKGLAFNMIEVDELPSLMKIQDHFRKS

SEQ ID NO: 13300 - protein, 234 aa, Homo sapiens
  DOMAIN (77)..(122): Cytosolic fatty-acid binding proteins domain identified by eMATRIX, accession number BL00214B, p-value=5.865e-22, raw score of 26.51
  DOMAIN (53)..(112): Lipocalin / cytosolic fatty-acid binding pr domain identified by PFam, accession name lipocalin, E-value=3.9e-07, PFam score of 28.7
SAGDTQQTGSGVDLQQTPTDLQLRVLSVRRKTNKQKGHPHQNPICTSPPSKTKGVNAMLRKVAVAAASKPHVEIRQDGDQFYIKTSTTVRTTEINFKVGEGFEEETVDGRKCRFFDMLRDLLKNVDLKGFEPDVRILLTKYSNSNGSQSPWMEEQIRDAWGSMVLKNVVRETDEVGKVPQAKGNNVVITSLMTNRGFFEEGEATFAPSFLMNIKGNKTSVVKNSILEQGQLTVN

SEQ ID NO: 13301 - protein, 398 aa, Homo sapiens
  DOMAIN (19)..(64): CARCINOEMBRYONIC ANTIGEN PRECURSOR AMINO-TERMINAL DOMAIN domain identified by eMATRIX, accession number DM00372A, p-value= 2.703e-38, raw score of 19.18
  DOMAIN (63)..(365): Immunoglobulin domain identified by PFam, accession name ig, E-value=1.9e-14, PFam score of 51.6
MGPLSAPPCTQHITWKGLLLTASLLNFWNLPITAQVTIEALPPKVSEGKDVLLLVHNLPQNLAGYIWYKGQLMDLYHYITSYVVDGQINIYGPAYTGRETVYSNASLLIQNVTREDAGSYTLHIIKRGDRTRGVTGYFTFNLYHTSYLWWMNGQSLPMTHRLQLSKTNRTLFIFGVTKYIAGPYECEIRNPVSASHSDPVTLNLLLKLPKPYITINNSKPRENKDVLAFTCEPKSENYTYIWWLNGQSLPVSPRVKRPIENRILILPSVTRNETGPYECEIRDRDGGMRSDPVTLNVLYGPDLPSIYPSFTYYRSGENLYLSCFAESNPPAEYFWTINGKFQQSGQKLSIPQITTKHRGLYTCSVRNSATGKESSKSMTVEVSEDPYDDTGSHTDKPE

SEQ ID NO: 13302 - protein, 143 aa, Homo sapiens; identical to SEQ ID NO: 8541
  DOMAIN (21)..(43): Globins profile domain identified by eMATRIX, accession number BL01033A, p-value=2.929e-17, raw score of 16.94
  DOMAIN (10)..(143): Globin domain identified by PFam, accession name globin, E- value=4.3e-55, PFam score of 196.4

SEQ ID NO: 13303 - protein, 144 aa, Homo sapiens
  DOMAIN (72)..(103): kw TRANSCRIPTASE REVERSE II ORF2 domain identified by eMATRIX, accession number DM01354G, p-value=2.071e-35, raw score of 11.57
  DOMAIN (1)..(122): AP endonuclease family 1 domain identified by PFam, accession name AP_endonucleas1, E-value=0.0044, PFam score of -70.3
LSYIYMHPIQRAPRFIKQALRDSQRDLDSHTIIMGDFNTPLSTLDRPTRQKVNKDIQELNSVLHQVDLIDIYRTFHPKSTEYTFFSAPHRTYSKIDHIVGSKALLSKCKRGEIITKIKLELRIKKQTQNRSTTWKLNNLLLNDY

SEQ ID NO: 13304 - protein, 222 aa, Homo sapiens
  DOMAIN (122)..(169): kw TRANSCRIPTASE REVERSE II ORF2 domain identified by eMATRIX, accession number DM01354V, p-value=1.000e-40, raw score of 12.97
MPVTLGTSMRSDSLGEPQTEVEPPLVIPRKTGSGVDLQQTPTDLQLRVLTVRRKTNKQKGHPHQNPICTSPSSKTKAQNLLKLISNFSKVSGYKINVQKSQAFLYNNNRQTESQIMSELPFTIASKRVKYLGIQLTRDVKDLFKENCKPLLKEIKEDTNKWKNIPYSWIGRINIVKMAIQPKVIYRFNAIPIKLPITFFTELEKTTLKFIWNQKEPAFPRQS

SEQ ID NO: 13305 - protein, 90 aa, Homo sapiens
  misc_feature (1)...(90): Xaa = X or * as defined in Table 2
GDIIPKCSQPLNIHFHYVFKMRXGSSRPGRGPEIRCFSPAARLLLTAHQQWPQLWAIFQQVALLLPHAGGADHVILFPSPVSKATEKIVG

SEQ ID NO: 13306 - protein, 32 aa, Homo sapiens
EVPNFPTFPCLLLSPPNCLNLCLLTSAKVAST

SEQ ID NO: 13307 - protein, 490 aa, Homo sapiens
  DOMAIN (321)..(362): kw TRANSCRIPTASE REVERSE II ORF2 domain identified by eMATRIX, accession number DM01354I, p-value=1.000e-40, raw score of 15.55
  DOMAIN (121)..(307): AP endonuclease family 1 domain identified by PFam, accession name AP_endonucleas1, E-value=0.0079, PFam score of -74.1
MDMLDKGMIQVPVESLECPEHFVQEPVLPSELRSEKQEPWNQPSLDLEPSFATYMACSMLPAERQDLRPTSLVISHGVSVKDRREHCQCPNYYPPLRNMSPLEHSIKICGGKKPQNDSQRITTITKVIVNQDFKQPDDTELSQGSRKETSEASLVTLLWELVTAGQTFQDDRMGTAPVYSSQRERRRRRVISACPTEPPLVTPRQTGSGVDLQQTPTDLQLRVLTIRRKTNKQKGHPPKPHLYVTIIKDQRTLHPKSTEYTFFSAPHPTYSKIDHIVGSKALLSKCKRTEIITNCLSDHSAIKLELRIKKLTQNRSTTWKLNNLLLNDYWVYKEMKAEIKMFFETNENKDTTYQNLWDTFKAMYSGKFMALNAHKRKQQRSKIDTLISQLTELEKQEQTHSKASRRQETTKIRAELKEIETQKTLQKINESRSWFFEKINKIDRTLARLIKKKREKNQIDTIKKIKVISPPIPQKYKLLFILFGTGTQIN

SEQ ID NO: 13308 - protein, 301 aa, Homo sapiens
  DOMAIN (227)..(272): kw TRANSCRIPTASE REVERSE II ORF2 domain identified by eMATRIX, accession number DM01354N, p-value=1.000e-40, raw score of 13.17
  DOMAIN (42)..(81): Phosphoglycerate mutase family domain identified by PFam, accession name PGAM, E-value=4.7e-06, PFam score of 26.0
MNGIYSRDTRELFPLCAMGALKEKSVACNVERPSPEPNHDGQGVDEPLSETGFKQAAAAGIFLNNVKFTHAFSSDLMRTKQPPLLIPRQTGSGVDLQQTPTDLQLRILTVRRKTNKQKGHPYQNPICTSPSSKTKELEKQEQTHSKASRRQEITKIRAELKEIETQKTLQKINDSRSWFSEKIDKIHRLRARLIKKKRGKNQIDAIKDDKGDITTDPTEIQTTIREYYKHLYANKLENLEEMDKFLDTYTLPRLNQEEVESLNRPITGSEIEAIINSLPTKKGPGPDRFTAEFYQRYKEEL

SEQ ID NO: 13309 - protein, 127 aa, Homo sapiens
YSLMVVCISLVFDDGDVHMGFWCGCPFCLLVFLLTVRTLSCRSVGVCWRSTPDPVCLGISSGGRASAKVGAPPAASLPPCSLISDSCAGSEQGSVGVGPSRPGAGYNLLVCRLLRPLGKRSIRVRVT

SEQ ID NO: 13310 - protein, 36 aa, Homo sapiens
  misc_feature (1)...(36): Xaa = X or * as defined in Table 2
TQTNLQEKNQTTQSKSGQRVXTDTSRKKTFMQPTDT

SEQ ID NO: 13311 - protein, 810 aa, Homo sapiens
  DOMAIN (69)..(98): MYOSIN HEAVY CHAIN SIGNATURE domain identified by eMATRIX, accession number PR00193D, p-value=3.647e-35, raw score of 14.36
  DOMAIN (1)..(139): Myosin head (motor domain) domain identified by PFam, accession name myosin_head, E-value=1e-96, PFam score of 334.7
MGVSSGDLLKGLLHPRVRVGNEYVTKGQSVEQVVFAVGALAKATYDRLFRWLVSRINQTLDTKLPRQFFIGVLDIAGFEIFEFNSFEQLCINFTNEKLQQFFNQHMFVLEQEEYKREGIDWVFIDFGLDLQPCIDLIEKEERLKPSRKKITKKHTKKRTASLILHAMICCRSLNSSKTKNTKCLNSINQRLKIWSLQKDLMCGTAGRCKTLHGTSQLNTTAIHVVLALAGSPKDADDTSIYMFYQKHILYCIVDSECKSRDVLQSYFDLLGELMKFNVDAFKRFNKYINTDAKVFLKQINSSLVDSNMLVRCVTLSLDRFENQVDMKAALLSIPGFVERLCKLATRKVSESTGTASFLQELEEWYTWLDNALVLDALMRVANEESEHNQVFWFEQHGLVSGAEKAPGTTIDQAPRIYRWSDLTRTQAQWQSAMTWSMSAFTETFLTERDKQSKWSGIPQLLLKLHTTSHLHSDFVECQNILKPLLVIPRQTGSGVDLQQTLTDLQLRVLTVRRKTNKQKGHPHQNPICMSPSSKTKEAKNLDKRLDEWLTRINSIEKTLNDLMELNTMARKLRDACTSFSSQFDQVEERVSVIEDQMNEMKREEKFREKRIKRNKQSLQEIWDCVKRPNLRLIGVPESDGENGTKLENTLQDIIQENFPNLARQVNIQIQEIQRTPQRYSSRRGTPRHIIVRFTKVEIKEKILRAAREKGRVTHKGKPIRLTAVLLAETLQARREWGPIFNILKEKNFQPRVSYPAKLSFISEGEVKSFTDKQMLRDFVTTRPALQELLKEALNMERNNRYQLLQKHAKL

SEQ ID NO: 13312 - protein, 376 aa, Homo sapiens
  DOMAIN (165)..(211): kw TRANSCRIPTASE REVERSE II ORF2 domain identified by eMATRIX, accession number DM01354O, p-value=1.000e-40, raw score of 8.73
  DOMAIN (198)..(376): Reverse transcriptase domain identified by PFam, accession name rvt, E-value=7.5e-11, PFam score of 49.5
LVEGKLTNRKNIHTKTPSVHHHHQRPKCGREMWGQSPHTESLLGHHLVELWEEGHCPLDPRMVDPPTACTMYLEKPQTLNASLWKAARSQVPQGGGKGTKKSETEIQATIREYYNKHLYANKLENLEETEKFLDTYTLPRLNQEEVESLNRRITGSKIEAIINSLPTKKSPGRDGFTAEFYQGYKEELVPFLLKLFQSIEKEGILPNSFYEASIILIAKPGRDTATTTKNFRTISLMNIDAKILNKILENQIQQHIKKLIHHNQVGFIPGMQGWFNIHKSINVIHHIKRTKNKNHMIISIDAGKAFDKIQQPFMLKTLNKLGIDGMYLKIIRAIYDKPTANIILNGQKLEAFPLKTGTRQGCHSYSTLTTPIQHSV

SEQ ID NO: 13313 - protein, 182 aa, Homo sapiens
  DOMAIN (49)..(66): BETA HAEMOGLOBIN SIGNATURE domain identified by eMATRIX, accession number PR00814A, p-value=1.000e-22, raw score of 12.94
  DOMAIN (21)..(93): Globin domain identified by PFam, accession name globin, E- value=2.8e-18, PFam score of 68.2
  misc_feature (1)...(182): Xaa = X or * as defined in Table 2
HSLFGTSEVINKLRSPDAMGHLTPEEDKATITSLWGKVNVEDAGGETLGRLLVVYPWTQRFFDSFGNLSSASAIMGNPKVKAHGKKVLTSLGRCHKSTWDDLKGTPFAQAXSELHCGQACMWDPEELSSFLGKCCWVTRFWAIPFSAKEFHPWRLQGFPGKSRRWQKMVTGVASALVPSRYH

SEQ ID NO: 13314 - protein, 174 aa, Homo sapiens
  DOMAIN (53)..(98): kw TRANSCRIPTASE REVERSE II ORF2 domain identified by eMATRIX, accession number DM01354N, p-value=1.000e-40, raw score of 13.17
  misc_feature (1)...(174): Xaa = X or * as defined in Table 2
LNALYFLLLPDCPGQNXXTASKTNKEEKREESNRCNKKXXSNITTNPTEIQTTIREYYKHLYANKLENLEEMDNFLDTYTLPRLNQEEVESLNRPITGSEMEAIINSLPTKKSPGPDGFTADFYQSVGSSGQGNQAGEGNKGHSIRKRGSQIVPVCRXHDCISRKPHRLSPKSP

SEQ ID NO: 13315 - protein, 270 aa, Homo sapiens
  DOMAIN (178)..(224): DEAD-box subfamily ATP-dependent helicases proteins domain identified by eMATRIX, accession number BL00039D, p-value=6.264e- 22, raw score of 21.67
  DOMAIN (135)..(229): Helicases conserved C-terminal domain identified by PFam, accession name helicase_C, E-value=8.2e-13, PFam score of 56.0
MCHSAIFTVLQPPLVVIPRQTGSQVDLQQTPTDLQLRVLTVRRKTKKQKGHPHQNPICMSPSSKTKATFEDSVWHFAERIIPDPNVIKLRKEELTLNNIRQYYVLCEHRKDKYQALCNIYGSITIGQAIIFCQTRRNAKWLTVEMIQDGHQVSLLSGELTVEQRAPFIQRFRDGKETVLITTNVCARGIDVKQVTIVVNFDLPVKQGEEPDYETYLQRIGRTGRFGKKRLAFNMIEVDELPSLMKIQDHFNSSIKQLHAEDMDEIEKIDY

SEQ ID NO: 13316 - protein, 356 aa, Homo sapiens
  DOMAIN (300)..(313): BTB (also known as BR-C/Ttk) domain proteins domain identified by eMATRIX, accession number PF00651, p-value=3.143e-10, raw score of 15.00
MASWEGKDLTVPQPDTRKGSVLRRISSLVPPYEKHPQISLWGNKCDLSLSGGESSSQNTNVLNSLEDLKPFILLNDMEHLWSLLSNCKKTREKASATRVYIVLDNSGFELVTDLILADFLLSSELATEVHFYGKTIPWFVSDTTIHDFNWLIEQEGVEAEKKAISLLSKLRNELQTDKPFIPLVEKFVDTDIWNQYLEYQQSLLNESDGKSRWFYSPWLLVECYMYRRIHEAIIQRHRINLSSDFLITPDFYWDRENLEGLYDKTCQFLSIGRRVKLNAQREFGFLCDCTVAIGDVYFKAHKSVLASFSNYFKMLFVHQTRFISLPLTAATTGLRLTHSQVPFGKTGFNKSHRKAS

SEQ ID NO: 13317 - protein, 217 aa, Homo sapiens
LLSNDQRCSISFNKTREKASATRVYIVLDNSGFELVTDLILADFLLSSELATEVHFYGKTIPWFVSDTTIHDFNWLIEQVKHSNHKWMSKCGADWEEYIKMGKWVYHNHIFWPVPHEYCAMPQVAHDLYAELQKAHLILFKGDLNYRKLTGDRKWEFSVPFHQALNGFHPAPLCTIRTLKAEIQVGLQPGQGEQLLASEPSWWTTGKYGIFQYDGPL

SEQ ID NO: 13318 - protein, 74 aa, Homo sapiens
GACGRPPPFPRPLPRGAPPPAMAAPFSPPPASAPGAAPTFPPSLGPAWHPALFLTGINLTCFSKEREKEAQSWY

SEQ ID NO: 13319 - protein, 207 aa, Homo sapiens
  DOMAIN (69)..(97): Dipeptidyl peptidase IV (DPP IV) N-terminal region domain identified by eMATRIX, accession number PF00930I, p-value=8.754e- 18, raw score of 15.96
  DOMAIN (2)..(57): Prolyl oligopeptidase family domain identified by PFam, accession name Peptidase_S9, E-value=1.9e-05, PFam score of 21.8
NRGSCHRGLKFEGAFKYKMGQIEIDDQVEGLQYLASRYDFIDLDRVGIHGWSYGGYLSLMALMQRSDIFRVAIAGAPVTLWIFYDTGYTERYMGHPDQNEQGYYLGSVAMQAEKFPSEPNRLLLLHGFLDENVHFAHTSILLSFLVRAGKPYDLQIYPQERHSIRVPESGEHYELHLLHYLQENLGSRIAHWLFNQMRRFNQQKTQN

SEQ ID NO: 13320 - protein, 195 aa, Homo sapiens
  DOMAIN (69)..(97): Dipeptidyl peptidase IV (DPP IV) N-terminal region domain identified by eMATRIX, accession number PF00930I, p-value=1.000e- 17, raw score of 15.96
  DOMAIN (2)..(58): Prolyl oligopeptidase family domain identified by PFam, accession name Peptidase_S9, E-value=7.5e-05, PFam score of 19.8
NRGSCHRGLKFEGAFKYKMGQIEIDDQVEGLQYLASRYDFIDLDRVGIHGWSYGGYLSLMALMQRSDIFRVAIAGSPVTLWIFYDTGYTERYMGHPDQNEQGYYLGSVAMQAEKFPSEPNRLLLLHGFLDENVHFAHTSILLSFLVRAGKQYDLQSYPQERHSIRVPESGEHYELHLLHYLQENLGSRIAALKVI

SEQ ID NO: 13321 - protein, 102 aa, Homo sapiens
  DOMAIN (31)..(57): kw SSR LIGASE CYCLO FORMYLTETRAHYDROFOLATE domain identified by eMATRIX, accession number DM01871C, p-value=9.850e-09, raw score of 20.79
PVLCGILEWSQTLMTVNEFISIYIVNEPRDVGCLAQHQLFDQIPELKQDISIPDYCSLGDGEEEEITINAWFGPQGTISPLHQDPQQNFLVQVGAAAGIVAF

SEQ ID NO: 13322 - protein, 199 aa, Homo sapiens
  DOMAIN (53)..(79): kw SSR LIGASE CYCLO FORMYLTETRAHYDROFOLATE domain identified by eMATRIX, accession number DM01871C, p-value=9.836e-10, raw score of 20.79
LQKWSLEYIQEIAGCRTVPVEVGSRYTDEEWSQTLMTVNEFISKYIVNEPRDVGYLAQHQLFDQIPELKQDISIPDYCSLGDGEEEEITINAWFGPQGTISPLHQDPQQNFLVQVMGRKYIRLYSPQESGALYPHDTHLLHNTSQVDVENPDLEKFPKFAKAPFLSCILSPGEILFIPVKYWHYVRALDLSFSVSFWWS

SEQ ID NO: 13323 - protein, 101 aa, Homo sapiens
  DOMAIN (1)..(99): AhpC/TSA family domain identified by PFam, accession name AhpC-TSA, E-value=3.8e-09, PFam score of 43.8
EIIAFSDRAEDFRKLGCEVLGVSVDSQFTHLAWINTPRKEGGLGPLNIPLLADVTRRLSEDYGVLKTDEGIAYVCPAGWKPGSDTIKPNVDDSKEYFSKHN

SEQ ID NO: 13324 - protein, 79 aa, Homo sapiens
  misc_feature (1)...(79): Xaa = X or * as defined in Table 2
GGWITRSGDRDHPGXHGEIPVYXKKLAGRGGGRLKSQLLGRLRQENGMNSGGRACSEPRSHHCTPAWVTERLLLKKKKK

SEQ ID NO: 13325 - protein, 255 aa, Homo sapiens
  DOMAIN (45)..(197): AhpC/TSA family domain identified by PFam, accession name AhpC-TSA, E-value=9.6e-05, PFam score of 0.1
  misc_feature (1)...(255): Xaa = X or * as defined in Table 2
PTRTKGFAGQGSLGAENAGPRVVIVRASRGLPTQLSVMASGNARIGKPAPDFKATAVVDGAFKEVKLSDYKGKYVVLFFYPLELHFCGAPTEIIAFSNPCRGTSRKLGLXSAGASRWDSHFTHLAWINTPRKRGEALGPLNIPPALLNGEPERLVXGIYGRCXKTDXGAFAYKGASLFIRLGKGCPFAKITLLIDLPVGTLPLDEGFCGLVQGLSQVHKTSHGGKFVPAGWKALPVATDXAPTWMTARKYFSKHN

SEQ ID NO: 13326 - protein, 100 aa, Homo sapiens
  DOMAIN (11)..(60): Eukaryotic RNA polymerase II heptapeptide repeat proteins domain identified by eMATRIX, accession number BL00115Z, p-value= 5.465e-10, raw score of 3.12
KNWPPPRFFYKGPPPSSSSSSSSSSSSSSSPLTPFFPSSSPGVCPLKGSSSSSPPPKKPGRPPSSSQKGGKPPFFKPPNFFPKNSPTPGGAPLKPFWKNF

SEQ ID NO: 13327 - protein, 66 aa, Homo sapiens
PPHNVPRRWSANLYLTPSNMVLLTAIALIGVCVFILAIIGILHWQEKKADDREKRQEAHRFHFDAM

SEQ ID NO: 13328 - protein, 98 aa, Homo sapiens
  DOMAIN (77)..(94): Zinc finger C2H2 type, domain proteins. domain identified by eMATRIX, accession number BL00028, p-value=9.609e-12, raw score of 16.07
  DOMAIN (47)..(97): Zinc finger, C2H2 type domain identified by PFam, accession name zf-C2H2, E-value=9e-12, PFam score of 52.5
NREEQNLVAYPHDGKIFFCTSQDIPPENELLFYYSRDYAQQIGQKNYRCTLCDKSFTQKAHLESHMVIHTGEKNLKCDYCDKLFMRRQDLKQHVLIHT

SEQ ID NO: 13329 - protein, 70 aa, Homo sapiens
  misc_feature (1)...(70): Xaa = X or * as defined in Table 2
VSPHVLIRRQSSRHLGSLYLQAPFVXMAGCLLETGSHVXTYKDLHVTITRHLPKLWKTRSTLNFQVARSS

SEQ ID NO: 13330 - protein, 255 aa, Homo sapiens
DYLCEKHQYRQLCGYLQPCQGSPCVWTPRAGSGRAALRTGMAVLARAAGQRLRARLPPQAQRARAAAGALRERGLCAPPRPPAPGAGRQSPQQSGELRVPSTTSSTCRSCWSARPWGSRRGRAVPQRRRNATATGSPRPLRRLRPAASPRRGAASERPNWPDPPRPRTARSRALNLRSSSKVNATLVPCHKETEAQRGVWTGETIPVRTCFGPLIGQQSHSMEVAEWTDKAVNHIWKAPRNTALKMTQTYNDPAD

SEQ ID NO: 13331 - protein, 444 aa, Homo sapiens
MRNKAVGQARAPPAQLAGWAAPFPKLLDGRPQVFPEMPQPVAGCTATGPREKLGGPGRPRGRVAASVQRLMNEMNLSPVGMEQLTSSSVSNALPVSGSHLGLAASPTHSAIPAPGILSYLADRPPPQYIHPNSINVDGNTALSITNNPSALDPYQSNGNVGLEPGIVSIDSRSVNTHGAQSLHPSDGHEVALDTAITMENVSRVTSPISTDGMAEELTMDGVAGEHSQIPNGSRSHEPLSVDSVSNNLAADAVGHGGVIPMHGNGLELPVVMETDHIASRVNGMSDSALSDSIHTVAMSTNSGPRESSAVAPVASHFSVHVFLFSFIWVSPADAETLGESLLGLTVYGSNDQDPYVTLKDTEQYEREDFLIKPSDNLIVCGRAEQDQCNLEVHGNYIAVGNMTPVIEVWDLDIVDSLEPVFTLGSKLSKKKKKKGKKVKKLINI

SEQ ID NO: 13332 - protein, 800 aa, Homo sapiens
  DOMAIN (615)..(632): Zinc finger C2H2 type, domain proteins. domain identified by eMATRIX, accession number BL00028, p-value=1.391e-12, raw score of 16.07
  DOMAIN (540)..(760): Zinc finger, C2H2 type domain identified by PFam, accession name zf-C2H2, E-value=2.3e-14, PFam score of 61.1
MKMNLSPVGMAQLTSSSVSNALPVSGSHLGLAASPTHSAIPAPGLPVAIPNLGPSLSSLPSALSLMLPMGIGDRGVMCGLPERNYTLPPPPYPHLESSYFRTILPGILSYLADRPPPQYIHPNSINVDGNTALSITNNPSALDPYQSNGNVGLEPGIVSIDSRSVNTHGAQSLHPSDGHEVALDTAITMENVSRVTSPISTDGMAEELTMDGVAGEHSQIPNGSRSHEPLSVDSVSNNLAADAVGHGGVIPMHGNGLELPVVMETDHIASRVNGMSDSALSDSIHTVAMSTNSVSVALSTSHNLASLESVSLHEVGLSLEPVAVSSITQEVAMGTGHVDVSSDSLSFVSPSLQMEDSNSNKENMATLFTIWCTLCDRAYPSDCPEHGPVTFVPDTPIESRARLSLPKQLVLRQSIVGAEVGVWTGETIPVRTCFGPLIGQQSHSMEVAEWTDKAVNHIWKIYHNGVLEFCIITTDENECNWMMFVRKARNREEQNLVAYPHDGKIFFCTSQDIPPENELLFYYSRDYAQQIGVPEHPDVHLCNCGKECNSYTEFKAHLTSHIHNHLPTQGHSGSIGPSHSKERKWKCSMCPQAFISPSKLHVYFMGHMGMKPHKCDFCSKAFSDPSNLRTHLKIHTGQKNYRCTLCDKSFTQKAHLGVHMVIHTGEKNLKCDYCVDKLFYGGSRDLQGRHVLIHTQERQIKCPKCDKLFLRTNHLKKHLNSHEGKRDYVCEKCTKAYLTKYHLTRHLKTCKGPTSSFVQAPEEEEEDDSEEEDLADSVGTEDCRINSAVYSADESLSAHK

SEQ ID NO: 13333 - protein, 590 aa, Homo sapiens
MQALIPLESGSGMTQTSGVSTETGDVVKDMGVNNQSKEGRCPWKDHEAAPWISEKPKKRGNEGKSKKFKNNYSTQPARMERKEEILNPPFEGKDGDTGSIPHKSKEIGFTFPKMHDSSFSHTPDTPTVEAVDRKGGNFQVNFVELGTLGENKISTVKASTVTEPPAKVTDVSCQEQIQGAGFVPSVVSEENKTDAANRYTAVADKPSERSNDGKSSGSAACEKLPTPTPQVVKEGDSFPDTLAKNGQEIAPAQISKSLMVDNYTKDGVPGQERPKGPSAVVPSTSTGGVALPITTAIETVNIHGDHSLKNKAELADSMKNEAGIDEGHVIGESESVHSGASKHSVEKVTELAKGHLLPGCASRRPEPTRRGQSPRRTHADRGNFPAHPVNEEKETKEGSVAVQIPDLLEDKAQKLSFCEDQNAQDRNSKGSDSLNKKVDLTLLSPKSENDKLKEISLACKITELESVSLPTPEIQSDFLHSKVEAPPSEVADTLVIMTASKGVRLPEPKDKILETPQKMTEKSESKTPGEGKKEDKSRMAEPMKGYMRPTKSRGLTPLLPKSTIQEQERHKQLKSAGMNLPWGNVCACGF

SEQ ID NO: 13334 - protein, 978 aa, Homo sapiens
GKGNHATVNLLSFLQRPQVGSLVHPPVVGHGNQRKSIHVDSLEPQRDLGREAWDIESTPIMMKKKKKKPKQKRYSQPRAGGPSDDDNADKPKGHPFAADTQKSGVLPSQPTTMGTEYGLVSGENLKRECLVNSSAARLVAENFVSESLRIPLYPSEEAPKTAISSQSKLRVEEESKSNKSVLQNQDKKLLKQHEYKPQPAPHLKTPVDKSQSVGPLNLKGPLAEVSAYNVETPLDIRLKEGCSFFLDQEVMGVVSKPTAAKEIPNLVPTLIASNPLECNLKEGNNESKMTKLQNVKLKEFPEGAEEDKELKKEAFPNERQEISIFTSEQLQGQVLVQVPGVENEPFKRMAGDGKSRKGRGSSGKMRTDSGKVKAKSELPFLLDSQKDGRAVLIPSEPVSKTEGMTTQDKSEELGLNSSKQPGTKADLTEAVVMGEPKEMTQPKVAGTMQALIPLESGSGMTQTSGVSTETGDVVKDMGVNNQSKEGRCPWKDHEAAPWISEKPKKRGNEGKSKKFKNNYSTQPARMERKEEILNPPFEGKDGDTGSIPHKSKEIGFTFPKMHDSSFSHTPDTPTVEAVDRKGGNFQVNFVELGTLGENKISTVKASTVTEPPAKVTDVSCQEQIQGAGFVPSVVSEENKTDAANRYTAVADKPSKRSNDGKSKKVKNSSPEKHILENKIDATKIHVPMETTGDQGIEGWPIWTKIEILRFTCPRTPSELINKSSPLEVLESAACEKLPTPTPQVVKEGDSFPDTLAKNGQEIAPAQISKSLMVDNYTKDGVPGQERPKGPSAVVPSTSTGGVALPITTAIETVNIHGDHSLKNKAELADSMKNEAGIDEGHVIGESESVHSGASKHSVEKVTELAKGHLLPGCASRRPEPTRRGQSPRRTHADREPKDKILETPQKMTEKSESKTPGEGKKEDKSRMAEPMKGYMRPTKSRGLTPLLPKSTIQEQERHKQLKSAEPLYGGCEINLIQF

SEQ ID NO: 13335 - protein, 157 aa, Homo sapiens
GVNKSWNHWLFHLGVREAEHAGVVRTPHHDLVLLPRGMAACALGACSLGAVALPGHPVAGGVSHGCSSSGTTYRGERHRVGRMRQKNRLNPGGGGCGEPRSRHYTPAWATEQNSVSKQNKTKQNKKHRLVHWNRKKWIYLLFALKKYKMSLMLCRKS

SEQ ID NO: 13336 - protein, 656 aa, Homo sapiens
MQALIPLESGSGMTQTSGVSTETGDVVKDMGVNNQSKEGRCPWKDHEAAPWISEKPKKRGNEGKSKKFKNNYSTQPARMERKEEILNPPFEGKDGDTGSIPHKSKEIGFTFPKMHDSSFSHTPDTPTVEAVDRKGGNFQVNFVELGTLGENKISTVKASTVTEPPAKVTDVSCQEQIQGAGFVPSVVSEENKTDAANRYTAVADKPSKRSNDGKSKKVKNSSPEKHILENKIDATKIHVPMETTGDQGIEGWPIWTKIEILRFTCPRTPSELINKSSPLEVLESAACEKLPTPTPQVVKEGDSFPDTLAKNGQEIAPAQISKSLMVDNYTKDGVPGQERPKGPSAVVPSTSTGGVALPITTAIETVNIHGDHSLKNKAELADSMKNEAGIDEGHVIGESESVHSGASKHSVEKVTELAKGHLLPGCASRRPEPTRRGQSPRRTHADRGNFPAHPVNEEKETKEGSVAVQIPDLLEDKAQKLSFCEDQNAQDRNSKGSDSLNKKVDLTLLSPKSENDKLKEISLACKITELESVSLPTPEIQSDFLHSKVEAPPSEVADTLVIMTASKGVRLPEPKDKILETPQKMTEKSESKTPGEGKKEDKSRMAEPMKGYMRPTKSRGLTPLLPKSTIQEQERHKQLKSAGMNLPWGNVCACGF

SEQ ID NO: 13337 - protein, 130 aa, Homo sapiens
  misc_feature (1)...(130): Xaa = X or * as defined in Table 2
VILLSKSLIIQENFFFFFXQSFALVAQAGVQWSNPCSLQPPPPGFNGFSCLILPSSWDYRRVPPCPANFVFLVETGFHHVGQAGLELLTSGDPPTSASQSAGITGVSHHAQPAEDIANNVTLFFPLHLFL

SEQ ID NO: 13338 - protein, 109 aa, Homo sapiens
NGWEFKHGPSWPGGFFFFFFFETESRSVATRLECSGVIPAHRNLCLPGSSDSPASASQLTGTTGAHHHARLIFVFLVETGLRHLSQAGLELLNLIIHQPWNPQELGLQA

SEQ ID NO: 13339 - protein, 632 aa, Homo sapiens
  DOMAIN (38)..(70): Bacterial-type phytoene dehydrogenase proteins domain identified by eMATRIX, accession number BL00982A, p-value=4.652e- 14, raw score of 18.41
  DOMAIN (37)..(595): Phytoene dehydrogenase related enzyme domain identified by PFam, accession name Phytoene_dh, E-value=2.6e-09, PFam score of - 159.2
MAASGRGLCKAVAASPFPAWRRDNTEARGGLKPEYDAVVIGAGHNGLVAAAYLQRLGVNTAVFERRHVIGGAAVTEEIIPGFKFSRASYLLSLLRPQIYTDLELKKHGLRLHLRNPYSFTPMLEEGAGSKVPRCLLLGTDMAENQKQIAQFSQKDAQVFPKYEEFMHRLALAIDPLLDAAPVDMAAFQHGSLLQRMRSLSTLKPLLKAGRILGAQLPRYYEVLTAPITKVLDQWFESEPLKATLATDAVIGAMTSPHTPGSGYVLLHHVMGGLEGMQGAWGYVQGGMGALSDAIASSATTHGASIFTEKTVAKVQVNSEGCVQGVVLEDGTEVRSKMVLSNTSPQITFLKLTPQEWLPEEFLERISQLDTRSPVTKINVAVDRLPSFLAAPNAPRGQPLPHHQCSIHLNCEDTLLLHQAFEDAMDGLPSHSDLGSAKIHTPKDRKCIPGEKSEDEGRPVIELCIPSSLDPTLAPPGCHVVSLFTQYMPYTLAGGKAWDEQERDAYADRVFDCIEVYAPGFKDSVVGRDILTPPDLERIFGLPGGNIFHCAMSLDQLYFARPVPLHSGYAGPLQGLYLCGSGAHPAPYSEILTSLTKRVPIQHVHPQPLRLWAVDLAPPQTFGAGSLEGARIY

SEQ ID NO: 13340 - protein, 116 aa, Homo sapiens
  DOMAIN (83)..(99): Bacterial-type phytoene dehydrogenase proteins domain identified by eMATRIX, accession number BL00982E, p-value=4.857e- 11, raw score of 9.88
CLLFFLTPSHFSVFGTPVFDCNRVYAPGFKDSVVGRDILTPPDLERIFGLPGGNIFHCAMSLDQLYFARPVPLHSGYRCPLQGLYLCGSGAHPGGGVMRAAGRNAAHVAFRDLKSM

SEQ ID NO: 13341 - protein, 239 aa, Homo sapiens
MGCKHWMTCGRARKEGKDDSYMQTQWLHRAFAAPPETCPFPLRDHIQTGRDLYILGTFEKCVFWGGAEREVWRERHQREPGLRAAFAGQLEFPAGVGLAGPALGAAGQPCWPRGNEGLSTRASGCGGCTGSSSSASPPVLCSISHQALAAFLRGRSRDLQRAMPEPPTPSMGSCAAGASPTSTTPCSKEPSPIDHPRAEECECTARDWQAAPPAALVRDPLGEASWAPESGGDMESLYI

SEQ ID NO: 13342 - protein, 59 aa, Homo sapiens
QLHADKVSRFATHAGVPWCDHGLFQPQPPPLKRSSCLSLWSSWDYRHAPPHPAIICLLL

SEQ ID NO: 13343 - protein, 366 aa, Homo sapiens; identical to SEQ ID NO: 8125
  DOMAIN (202)..(220): CYTOCHROME B-245 HEAVY CHAIN SIGNATURE domain identified by eMATRIX, accession number PR00466E, p-value=1.000e-21, raw score of 6.82
  DOMAIN (1)..(365): Ferric reductase like transmembrane com domain identified by PFam, accession name Ferric_reduct, E-value=1.1e-35, PFam score of 132.0

SEQ ID NO: 13344 - protein, 79 aa, Homo sapiens
PPRFKRFSCLGLSSSWDYRCTPPRSANFCILVEMGFHHVGQAGLELLTSDDPPTLASQSAGITGVSHHAGPHRFLINIY

SEQ ID NO: 13345 - protein, 111 aa, Homo sapiens
YFISSHFIISFHYVISFHLITFHLISFHHHFISSFHFISSFHLFISFHHHHLINSFHLISSFHHFISSFHLISYLISFQFHFHYFMSSHLISSFHLITSHHFINFIISSFH

SEQ ID NO: 13346 - protein, 55 aa, Homo sapiens
  misc_feature (1)...(55): Xaa = X or * as defined in Table 2
GLSFHMLKKKVYKYMCIYMYICTHTHTHLIXMYINRPSLYDYQFLFYYLSQLDSC

SEQ ID NO: 13347 - protein, 44 aa, Homo sapiens
  misc_feature (1)...(44): Xaa = X or * as defined in Table 2
GVSPCWPGWSRAPDLKXSAHLGLPKCWHYRRPIHDCGQAPHLHC

SEQ ID NO: 13348 - protein, 202 aa, Homo sapiens
  misc_feature (1)...(202): Xaa = X or * as defined in Table 2
KKKKIFIGHQLRWLXRFFFFFFFETGSHSVPQAGVQWCDHGSLQPQSPWAQRSSNLSLPSSWDYRHLPPCLANFFIFFVEMGLTMWPRLVLNSGPSDLPASVSQSAGITGVSHRNWWPMKIFFFFQTASHSVAQAGVQWCNLGSLQALPPAFMPFSCLLPQPPSSWDYRSLPPCLANFCFGFLVETGVSPCWPGWSRTPDLR

SEQ ID NO: 13349 - protein, 122 aa, Homo sapiens
GRQERGERERSSRPLGGRKCQHWLAVNAQQKLLALQVEKAKVEVGVAPALGILVVAGCSFAIRRYQKKSDSLKQPQNPVLEAAVGVPVEMSLPHASSSLTLVPCLRRSLDPFLCFPLSLAKV

SEQ ID NO: 13350 - protein, 153 aa, Homo sapiens
  DOMAIN (48)..(100): Pyruvate kinase proteins domain identified by eMATRIX, accession number BL00110D, p-value=4.682e-23, raw score of 24.83
  DOMAIN (36)..(100): Pyruvate kinase domain identified by PFam, accession name PK, E-value=1.6e-22, PFam score of 84.4
QRTFCKGKWKGAAKILIDLNNLFLCKLEQKGTDLLVIAMENYGSLGSKKGVDLPGAVDLLAMSEKDIQDLKFGVEWDVDMVFASFIHVASNVHEIRKAIIANWSKVPTCPPELGSYLPRGTETHSYFYISYSSDQIQICKPLHYSYGRNYDTL

SEQ ID NO: 13351 - protein, 93 aa, Homo sapiens
  DOMAIN (11)..(26): WILM'S TUMOUR PROTEIN SIGNATURE domain identified by eMATRIX, accession number PR00049D, p-value=9.071e-10, raw score of 0.00
RSPPAGSPPPSAPAPRLPPPPAPPPALPFPASRPTPFPPLPVSLPVLPSSRSLSLPPAFLFSFFCIGVLGLLHTRALSIAAYIKAGAIMQLYC

SEQ ID NO: 13352 - protein, 881 aa, Homo sapiens
  DOMAIN (384)..(758): Armadillo/beta-catenin-like repeats domain identified by PFam, accession name Armadillo_seg, E-value=2.1e-05, PFam score of 31.4
MAAPGAPAEYGYIRTVLGQQILGQLDSSSLALPSEAKLKLAGSSGRGGQTVKSLRIQEQVQQTLARKGRSSVGNGNLHRTSSVPEYVYNLHLVENDFVGGRSPVPKTYDMLKAGTTATYEGRWGRGTAQYSSQKSVEERSLRHPLRRLEISPDSSPERAHYTHSDYQYSQRSQAGHTLHHQESRRAALLVPPRYARSEIVGVSRAGTTSRQRHFDTYHRQYQHGSVSDTVFDSIPANPALLTYPRPGTSRSMGNLLEKENYLTAGLTVGQVRPLVPLQPVTQNRASRSSWHQSSFHSTRTLREAGPSVAVDSSGRRAHLTVGQAAAGGSGNLLTERSTFTDSQLGNADMEMTLERAVSMLEADHMPPSRISAAATFIQHECFQKSEARKRVNQLRGILKLLQLLKVQNEDVQRAVCGALRNLVFEDNDNKLEVAELNGVPRLLQVLKQTRDLETKKQITDHTVNLRSRNGWPGAVAHACNPSTLGGQGGRITRSGVRDQPDQHGLLWNLSSNDKLKNLMITEALLTLTENIIIPFSGWPEGDYPKANGLLDFDIFYNVTGCLRNMSSAGADGRKAMRRCDGLIDSLVHYVRGTIADYQPDDKATENCVCILHNLSYQLEAELPEKYSQNIYIQNRNIQTDNNKSIGCFGSRSRKVKEQYQDVPMPEEKSNPKGVEWLWHSIVIRMYLSLIAKSVRNYTQEASLGALQNLTAGSGPMPTSVAQTVVQKESGLQHTRKMLHVGDPSVKKTAISLLRNLSRNLSLQNEIAKETLPDLVSIIPDTVPSTDLLIETTASACYTLNNIIQNSYQNARDLLNTGGIQKIMAISAGDAYASNKASKAASVLLYSLWAHTELHHAYKKAQFKKTDFVNSRTAKAYHSLKD

SEQ ID NO: 13353 - protein, 118 aa, Homo sapiens
FYFLRWSFTLIAQAGVQWRDLGSPQPLPPRFKQFSCLSLLNSWDYRHAPPRPANFLCFLVETRFLHAGQAGLELLTSGDPPTLASQSAGITGASHRNRPVQSILRLEGLLETIVQPPT

SEQ ID NO: 13354 - protein, 91 aa, Homo sapiens
FFLETEFRSTQSPRLECSGAISAHCNLQLPGPSHSPASASRAAETTGLCHHARLIFVFLVEMRFHHVGQSGLELRQAICLPRPPKVLGPQA

SEQ ID NO: 13355 - protein, 115 aa, Homo sapiens
LHHFPKPICPAHFSACIHWPQHPHTCACTQAHMCKPKHTHTHACTHICVLSGTHPWVHTGVCARSSSSSPSSSSSSLRYTRQVHALLHTAQPQRLKASEPTPAQLQPGRQEGLTG

SEQ ID NO: 13356 - protein, 100 aa, Homo sapiens [sequence omitted]

SEQ ID NO: 13357 - protein, 55 aa, Homo sapiens
  misc_feature (1)...(55): Xaa = X or * as defined in Table 2
GLSFHILKKKVYKYMCIYMYICTHTHTHLIXMYINRPSLYDYQFLFYYLSQLDSC

SEQ ID NO: 13358 - protein, 112 aa, Homo sapiens
DSIFTLVCAEHINFLRAGQHWGCVIDCLHYNKQAVTGDHSSYSAERSSTPENGGREGTREQGERRGGTWGRGGGQERPSIPDRQKNQGRGGGGNPLSGRGKVKAITIILLII

SEQ ID NO: 13359 - protein, 132 aa, Homo sapiens
  DOMAIN (81)..(125): GTP-binding nuclear protein ran proteins domain identified by eMATRIX, accession number BL01115A, p-value=2.688e-14, raw score of 10.22
  DOMAIN (82)..(132): Ras family domain identified by PFam, accession name ras, E- value=0.017, PFam score of -108.6
LVEDFVWYQAAPTLRALLPSLIGFAGCPSLLHSPLIGHSTAALRGAGSAPVGCLWWGCGVADPAGSARTMGTRDDEYDYLFKVVLIGDSGVGKSNLLSRFTRNEFNLESKSTIGVEFATRSIQVDGKTIKAQ

SEQ ID NO: 13360 - protein, 43 aa, Homo sapiens
  misc_feature (1)...(43): Xaa = X or * as defined in Table 2
SSFKVMELCPELVGSWSHXLQEXSRGPLRXRTHSSRYMVKRQE

SEQ ID NO: 13361 - protein, 250 aa, Homo sapiens
HYLDVAPFLFPDRALLPSLIGFAGCPSLLHSPLIGHSTAALRGAGSAPVGCLWWGCGVADPAGSARTMGTRDDEYDYLFKAQCLQALGSRHLSTPPHRWQPRWCSTQGTGGKVVGAVVGGVWGFTEPRLPAQWCSSGTQAWARATCCRASPATSSTWRARAPSAWSSPPAASRWTARPSRRRSGTPLARSATAPSPPQLSLLPSSLWVLATSSPTITIALAMAAGNLCPLPSSCRRRRRWCQASQQRGCL

SEQ ID NO: 13362 - protein, 136 aa, Homo sapiens
LRTYPTIRGPVREEKWGYVQTESRSVAWAGVQWHCFTELRGFLVSLTSRMKPRTLAVSVPALKVARLEFVSSDVQRWGFHHVGPAGLELLTSSDLPVSASQMAGITGTRHRAWPWEHVYMDFVHFLKQTEGNLLDL

SEQ ID NO: 13363 - protein, 55 aa, Homo sapiens
FFETGSCSVAQAGMQCSDHGSLQPCPPGSWDPPALASQSAGITSMSHHNHPKLFI

SEQ ID NO: 13364 - protein, 149 aa, Homo sapiens
NHLGGFKQILMPRLHPMPMKSFLGVSARQLYFFFFFFFETESHSIVQAGVQWRDLGSLQPLPPGFKQFSCLSLPSSWNYRHTLPRPANFLYFLVETGFHCVAQAGLKLLSSGNLPALASQSARITGMSHHARLAVVFFKALLSSSRTRI

SEQ ID NO: 13365 - protein, 66 aa, Homo sapiens
  misc_feature (1)...(66): Xaa = X or * as defined in Table 2
DGLCSKQTXNGVPSITNPIKTANQHQGKKQHPIQGNRTAPSSSVSYMKRCELLPKGTGLEVVRESG

SEQ ID NO: 13366 - protein, 627 aa, Homo sapiens
  DOMAIN (537)..(592): Sodium:sulfate symporter family proteins domain identified by eMATRIX, accession number BL01271D, p-value=5.979e-32, raw score of 25.26
  DOMAIN (3)..(603): Sodium:sulfate symporter transmembrane domain identified by PFam, accession name Na_sulph_symp, E-value=7.5e-77, PFam score of 268.7
MGLLQGLLRVRKLLLVVCVPLLLLPLPVLHPSSEASCAYVLIVTAVYWVSEAVPLGAAALVPAFLYPFFGVLRSNEVAAEYFKNTTLLLVGVICVAAAVEKWNLHKRIALRMVLMAGAKPGMLLLCFMCCTTLLSMWLSNTSTTAMVMPIVEAVLQELVSAEDEQLVAGNSNTEEAEPISLDVKNSQPSLELIFVNEDRSNADLTTLMHNENLNGVPSITNPIKTANQHQGKKQHPSQEKPQVLTPSPRKQKLNRKYRSHHDQMICKCLSLSISYSATIGGLTTIIGTSTSLIFLEHFNNQYPAAEVVNFGTWFLFSFPISLIMLVVSWFWMHWLFLGCNFKETCSLSKKKKTKREQLSEKRIQEEYEKLGDISYPEMVTGFFFILMTVLWFTREPGFVPGWDSFFEKKGYRTDATVSVFLGFLLFLIPAKKPCFGKKNDGENQEHSLGTEPIITWKDFQKTMPWEIVILVGGGYALASGSKSSGLSTWIGNQMLSLSSLPPWAVTLLACILVSIVTEFVSNPATITIFLPILCSLSETMHINPLYTLIPVTMCISFAVMLPVGNPPNAIVFSYGHCQIKDMVKAGLGVNVIGLVIVMVAINTWGVSLFHLDTYPAWARVSNITDQA

SEQ ID NO: 13367 - protein, 175 aa, Homo sapiens
SLHDSTADSIRTTCQGVISTLKAHYLRRTFQHILEAADGEDPSYIKEFWRNYSIMDAVDMAIAWEELKPALMNSMWKKIWPECVQAQRFSQADNIAQLQKNIVTLARNVAFEEVAEAAVDQLLQSHEEDLSNEELMRLEQELAVGEEEREDGPWALWQLTTGRLSAALSHFEAGL

SEQ ID NO: 13368 - protein, 16 aa, Homo sapiens
FLAHHVHGGLCCVPQR

SEQ ID NO: 13369 - protein, 121 aa, Homo sapiens
HASAHAFGQLSCVSKLMRDVCGQPCFSPRGMVLYLQWGKRKYSRGNSSWQIKEKVWRFSTAFCSVNEWKFADILSMADHLKKCSYNVVEKREEAIPLPCMCVTRELTKEGRSLRSVLKPVL

SEQ ID NO: 13370 - protein, 73 aa, Homo sapiens
  misc_feature (1)...(73): Xaa = X or * as defined in Table 2
AEDKSQMLLDLRWSYIRTSSSSADRSHASGPRIAHKWSTVDRNRPRYDSNNELAEKEQLSXICSICSRVFFKA

SEQ ID NO: 13371 - protein, 103 aa, Homo sapiens
LMKKIWSLYLGDRAGICLKRKKIGRVWWHVPVVPAARGAGVGGSLEPGSLRLQRAVIALLHSSLGDRVTVSKKKKKIKHTSVFHFSFNHNHALKNTLEHMEQI

SEQ ID NO: 13372 - protein, 124 aa, Homo sapiens
QTVARRCTALTFIASEEKVLVADKSGDVYSFSVLEPHGCGRLELGHLSMLLDVAVSPDDRFILTADRDEKIRVSWAAAPHSIESFCLGHTEFVSRISVVPTQPGLLLSSSGDRHPEALGVQERP

SEQ ID NO: 13373 - protein, 293 aa, Homo sapiens
  DOMAIN (126)..(141): G-PROTEIN BETA WD-40 REPEAT SIGNATURE domain identified by eMATRIX, accession number PR00320A, p-value=4.176e-10, raw score of 16.74
PNDSKRLILFRTKPWQCLSVRTVARRCTALTFIASEEKVLVADKSGDVYSFSVLEPHGCGRLELGHLCMLLDVAVSPDDRFILTAARDEKMRVSWAAAPHSIESFCLGHTEFVSRISVVPHSARALLSSSGDGTLRLWEYRSGRQPALLSPWPVCRSSVDPQAPQKFAASRIAFWCQENCVALLCDGTPCGLHLPAGRPQTAVGVQAAAGVPAPSVGRGFRGDPGAVGAPGLARKPPWCSYRHVGDQWQSVPESTVLKKVSGVLRGNWPMLERLCRRRRQLSAVSYKAHVPTT

SEQ ID NO: 13374 - protein, 130 aa, Homo sapiens
APMAGCLSFYYLIQQGDDKGFSLYTRDGAGLYKEIWKADRPGNAAWNLAEGEFNAPYPMEVIFEDAFNGPKGGYVALDDISFSPVHCQNQTELLFSAVEASCNYEQDLCNFYQDKKRPGWTRVKGKPNML

SEQ ID NO: 13375 - protein, 485 aa, Homo sapiens
KLPPPPGECTFEQDECTFTAGEKKPEQLAQEEGETPTSYTGPKGDHTTGVVVSSHLASECPFGLNSDALLPKKICSLVLLLTSFLAASADSGTMLLRWGCLKSKIKMSVGLVPSEISLLGLQMAAFLLHMAFPLCQCTPDMYLLLTVGNRNHGRQKQIKGALLYWTFTTCRHCARNLNILSTTCKDKVGEFAKLSKIELLEATEKSIGPPEMHKYHCELKNLREKEKQLEDLLATKIASKVAKLGILLGMPTLEIGGKEGGGWGTGYWLRAEKEDGDYLCIEGSEGLNTEKIVPVMQERNSININKKDVHSETPAKGHQLQRPKVDKSMKMGRNQHKKAENSKTQITSSPPKDPKSSPAREQTCMENEFDKLTEVGFRRWAITNSPELKEDVLTQCKEAKNLEKRLDKLLTRITSLEKSMNDLMELKNTGRELCEAYTSINSRIDQVEERISEIEDQLNEIKQDDKIREKRVKRNKQSPKKYGTL

SEQ ID NO: 13376 - protein, 131 aa, Homo sapiens
MYGGGTGLLSVYLKKEEDSEESLLWRRRGEQSISWLRALIEYSCERQHQLLRVKYTAMGQGDFGGCCSSPGKRSDGLGYAAEIIFEAIRGVSIRSDIAIDDVKFQAGPCGEMEDTTQQSSGYSEDLNEIEY

SEQ ID NO: 13377 - protein, 379 aa, Homo sapiens
  DOMAIN (48)..(278): MAM domain identified by PFam, accession name MAM, E-value= 7.8e-05, PFam score of 15.6
MKRKHVPIDDKMLQQKALRLHEDFSKGSPETSDTKPFTASPEQLQSSEISAQKGGDEVTWQFPSSTSSMSGSLKPPPLDQGHYMYVDSVYVKHFQEVAQLISPLTTAPMAGCLSFYYQIQQGNDNVFSLYTRDVAGLYEEIWKADRPGNAAWNLAEVEFSAPYPMEPFPLGKDKLLGFPVDFGEFRYQVLMGPLLLRLLTHTRGMHTWVVFPAQVKAVLTSDSPMVTGRRWLTELTVKVAGREESKTKGVIFEVAFNGPKGGYVALDDISFSPVHCQNQTELLFSAVEASCNFEQDLCNFYQDKEGPGWTRVKVKPNMYRAGDHTTGLGKSEICLCGDILGSRELYWPFLLHTCKDIDLKKKGSCEEAKTISSLVFDHF

SEQ ID NO: 13378 - protein, 596 aa, Homo sapiens
  DOMAIN (491)..(503): MAM DOMAIN SIGNATURE domain identified by eMATRIX, accession number PR00020C, p-value=2.615e-11, raw score of 13.66
  DOMAIN (252)..(579): MAM domain identified by PFam, accession name MAM, E-value= 4.9e-91, PFam score of 315.9
MAETAVINHKKRKNSPRIVQSNDLTEAAYSLSRDQKRMLYLFVDQIRKSDGTLQEHDGICEIHVAKYAEIFGLTSAEASKDIRQALKSFAGKEVVFYRPEEDAGDEKGYESFPWFIKRCATAVGRQRTHADKERGAREKGGEKKAKAKKTSGTRKRGGGRERKKKGEQEGKDGQRNAQTKGEKRQPHKANTPPKTLQQRKEKKTGDSHRRKKKLFKESEKVLSQEWEHDFVIETMATGARPQLLFSAVEASCNFEQDLCNFYQDKEGPGWTRVKVKPNMYRAGDHTTGLGYYLLANTKFTSQPGYIGRLYGPSLPGNLQYCLRFHYAIYGFLKMSDTLAVYIFEENHVVQEKIWSVLESPRGVWMQAEITFKKPMPTKVVFMSLCKSFWDCGLVALDDITIQLGSCSSSEKLPPPPGECTFEQDECTFTAGEKKPEQLAQEEGETPTSYTGPKGDHTTGVGYYMYIEASHMVYGQKARLLSRPLRGVSGKHCLTFFYHMYGGGTGLLSVYLKKEEDSEESLLWRRRGEQSISWLRALIEYSCERQHQIIFEAIRGVSIRSDIAIDDVKFQARPCGEMEDTPQQSSGYSEDLNEIEY

SEQ ID NO: 13379 - protein, 93 aa, Homo sapiens
  misc_feature (1)...(93): Xaa = X or * as defined in Table 2
KIGPQPGQHSKTLSLXTIKKKLARCGGTCLWSQLLGRLRWEDCLSAGSXGCGELXSYHCTPAWVTERDLVSKTQKNRAITGKLLLDVLSLLIR

SEQ ID NO: 13380 - protein, 129 aa, Homo sapiens
  misc_feature (1)...(129): Xaa = X or * as defined in Table 2
RNKKQGYPAFHVFSTFFYPKXKSGGYQAVKRWTKGVNLFEQEIILVPIHRKVHWSLVQYLQDESKTKRNSDLNLLEWTHHSMKPHEIPQQLNGSDCGMFTCKYADYISRDKPITFTQVSEDPLHPFTCY

SEQ ID NO: 13381 - protein, 127 aa, Homo sapiens
MNLLVERNKKQGYPALHVFSTFFYPKLKSGGYQAVKRWTKGVNLFEQEIILVPIHRKVHWSLVVIDLRKKCLKYLDSMGQKGHRICEMVLGYLQDESKTKRNSDLNLLEWTHHSMKPHEIPQQLNGE

SEQ ID NO: 13382 - protein, 52 aa, Homo sapiens
GGGVLTLLVEVSNIFLTIRMMMKISNAQDHLLYRVNKGPWAPSCWVSCSCWT

SEQ ID NO: 13383 - protein, 134 aa, Homo sapiens
TRRADPLRTWRWHNLLVSFAHSIVSGIWALLCVWQTPDMLVEIETAWSLSGYLLVCFSAGYFIHDTVDIVASGQSASLLEYLVHHVMAMGAFFSGIFWSSFVGGGVLTLLVEVSNIFLTIRMMMKISNAQDHLL

SEQ ID NO: 13384 - protein, 118 aa, Homo sapiens
  misc_feature (1)...(118): Xaa = X or * as defined in Table 2
KYLFFFLKDHTKVGKRRMSIRLHQNLGRGRTKSCLKKLVAGANCRDQDDPSPRNQQPRSATFRPSPNRCHXIPQXPYSAQCPHPGSGGQFRSLRGLIVEYRSSERHISYRRYAGLCEY

SEQ ID NO: 13385 - protein, 137 aa, Homo sapiens
  DOMAIN (74)..(100): PROTEIN REPEAT NEUROFILAMENT TRIPL domain identified by eMATRIX, accession number PD01351B, p-value=8.984e-09, raw score of 13.72
AAIEELCGRQAARAEAVRGLRGPRGLRWPLPWHPAPPAHGAPLARPGARARRSEKPPSEKPRLRRSSPRAQEEGPGEPPPPELALLPPPPPPPPTPATPTSSASNLDLGEQRERWETFQKRQKLTSKGCRQAPARHL

SEQ ID NO: 13386 - protein, 148 aa, Homo sapiens
  DOMAIN (47)..(73): PROTEIN REPEAT NEUROFILAMENT TRIPL domain identified by eMATRIX, accession number PD01351B, p-value=8.984e-09, raw score of 13.72
RPLPWHPAPPAHGAPLARPGARARRCEKPPSEKPRLRRSSPRAQEEGPGEPPPPELALLPPPPPPPPTPATPTSSASNLDLGEQRERWETFQKRQKLTSEGAAKLLLDTFEYQGLVKHTGGCHCGAVRFEVWASADLHIFDCKYRNYI

SEQ ID NO: 13387 - protein, 88 aa, Homo sapiens
FLMESRSVTRLECSSTITAHCNLCLPVSSDSAVSASQVAGTTGMRHHAQLIFVFLVETGFHHVGQDGLHLLNIVIHLPRPPKVLGLQA

SEQ ID NO: 13388 - protein, 130 aa, Homo sapiens
WLVGFGFGFFEIESRPVAQAGVQWRNLGSLQPSPSKFKRFSFLNLPSSLDYRHTPPSLANFLYLVQMGFHHVGQDGLELLTSDPPTLASQSAEITGVSHRTQPRSAILLQSQSSLLPLLRTFISSVPVTE

SEQ ID NO: 13389 - protein, 434 aa, Homo sapiens
HEISLGAICAVLLVIMGLFATRCNREKKDTRSYNCRVAESTYQHHPKRPSRQIHKGDITLVPTINGTLPIRSHHRSSPSSSPTLERGQMGSRQSHNSHQSLNSLVTISSNHVPENFSLELTHATPAVEQVSQLLSMLHQGQYQPRPSFRGNKYSRSYRYALQDMDKFSLKDSGRGDSEAGDSDYDLGRDSPIDRLLGEGFSDLFLTDGRIPAAMRLCTEECRVLGHSDQCWMPPLPSPSSDYRSNMFIPGEEFPTQPQQQHPHQSLEDDAQPADSGEKKKSFSTFGKDSPKMRTLGDTSTSSLLSEMSSVFQRLLPPSLDTYSECSEVDRSNSLERRKGPLPAKTVGYPQGVAAWAASTHFQNPTTNCGPPLGTHSSVQPSSKWLPAMEEIPENYEEDDFDNVLNHLNDGKHELMDASELVAEINKLLQDVRQS

SEQ ID NO: 13390 - protein, 106 aa, Homo sapiens
  DOMAIN (44)..(74): NAD:arginine ADP-ribosyltransferases proteins domain identified by eMATRIX, accession number BL01291A, p-value=1.000e- 20, raw score of 22.07
  DOMAIN (16)..(102): NAD:arginine ADP-ribosyltransferase domain identified by PFam, accession name ART, E-value=7.3e-23, PFam score of 83.8
  misc_feature (1)...(106): Xaa = X or * as defined in Table 2
HHLHFLQRHKSQMRTMNTGLFEILTMLLTTMNLVDIFHEKADVVDMAYNAFDDEYLNCTDRMDIKYVVQLLKEEQASHHHXDTECENAXARWAARMTHIFLPMDYN

SEQ ID NO: 13391 - protein, 118 aa, Homo sapiens
GVSTVGIGRGSRLELWAPPEKYTPPGRPSHPLWLWGEGGGSIRREIDTTSSPHQVPVQSWFDDMGNTELLNLIPIFEELNGAKDVYTSLGAAAGPLDCPAFKRRPFHYGTFPHCAFTI

SEQ ID NO: 13392 - protein, 156 aa, Homo sapiens
  misc_feature (1)...(156): Xaa = X or * as defined in Table 2
HASAHASAHQVYVLKRPYVDEFLRGMGELFECVLFTASLAKYADPVTDLLDRRGVFRARLFRESCVFHQGCYVKDLSRLGRDLRKTLILDNSPASYIFHPENAEPVQSWFDDMAYTELLNLIPIFEELSGAXDVYTSLGAAAGPLACPASKRRPSQ

SEQ ID NO: 13393 - protein, 651 aa, Homo sapiens
  DOMAIN (39)..(172): Phosphotyrosine interaction domain (PTB/PID) domain identified by PFam, accession name PID, E-value=1.1e-44, PFam score of 161.8
MNKLRQSFRRKKDVYVPEASRPHQWQTDEEGVRTGKCSFPVKYLGHVEVDESRGMHICEDAVKRLKAERKFFKGFFGKTGKKAVKAVLWVSADGLRVVDEKTKDLIVDQTIEKVSFCAPDRNFDRAFSYICRDGTTRRWICHCFMAVKDTGERLSHAVGCAFAACLERKQKREKECGVTATFDASRTTFTREGSFRVTTATEQAEREEIMKQMQDAKKAETDKIVVGSSVAPGNTAPSPSSPTSPTSDATTSLEMNNPHAIPRRHAPIEQLARQGSFRGFPALSQKMSPFKRQLSLRINELPSTMQRKTDFPIKNAVPEVEGEAESISSLCSQITNAFSTPEDPFSSAPMTKPVTVVAPQSPTFQANGTDSAFHVLAKPAHTALAPVAMPVRETNPWAHAPDAANKEIAATCSGTEWGQSSGAASPGLFQAGHRRTPSEADRWLEEVSKSVRAQQPQASAAPLQPVLQPPPPTAISQPASPFQGNAFLTSQPVPVGVVPALQPAFVPAQSYPVANGMPYPAPNVPVVGITPSQMVANVFGTAGHPQAAHPHQSPSLVRQQTFPHYEASSATTSPFFKPPAQHLNGSAAFNGVDDGRLASADRHTEVPTGTCPVDPFEAQWAALENKSKQRTNPSPTNPFSSDLQKTFEIEL

SEQ ID NO: 13394 - protein, 78 aa, Homo sapiens
PPTAISQPASPFQGNAFLTSQPVPVGVVPALQPAFVPAQSYPVANGMPYPAPNVPVVGFVCSNCHFIFTLLDMGTVWV

SEQ ID NO: 13395 - protein, 154 aa, Homo sapiens
  DOMAIN (108)..(153): Phosphotyrosine interaction domain (PTB/PID) domain identified by PFam, accession name PID, E-value=2.5e-13, PFam score of 51.8
MNNPHAIPRRHAPIEQLARQGSFRGFPALSQKMSPFKRQLSLRINELPSTMQRKTDFPIKNADSGLVHKYSLPFRTVSQAFVWPLYSYASLYRSILVIKSVAKVLDLDLIVDQTIEKVSFCAPDRNFDRAFSYICRDGTTRRWICHCFMAVKDT

SEQ ID NO: 13396 - protein, 182 aa, Homo sapiens
MVKPLSLQMVPLHSSLGNRGSLSENKNTGVWESAASCCMAGCGGPADGICSEPLGHDQDGRAQSLLLWAKLTRKDRFSSQPRSIPSFDFLKAKALAKQRETIWEKVFSPFQAGVLSPPGSATLLSTLEQGAVGQKPPSVPCLMGLFVEHLTTWQLTSSVQASKSKREDSPETVIAKQKAQSF

SEQ ID NO: 13397 - protein, 615 aa, Homo sapiens
  misc_feature (1)...(615): Xaa = X or * as defined in Table 2
MWSVPCLEKVDVLAWTVLCLAVKIKMNKLRQSFRRKKDVYVPEASRPHQWQTDEEGVRTGKCSFPVKNWQRLFIQSLLAMRSLSASCCHQPAVYSSHGTQAVHAKGCLQAHAHRACCPSCTSPAAAAIFAAATPDGPLLPSRPLVNLIEKSQALVRETLTSQASAPNSGRAGQPVTVCLSGANAAWRPALEAPVDTGLWPETQAVSQCLGXEHSACLERKQKREKECGVTATFDASRTTFTREGSFRVTTATEQAEREEIMKQMQDAKKAQTSVNXTAFPRGRTSTTSTGRLWLMGRPASLARGMSVWMAAAGLSAVITSWTRPSRRTSVCGVGVTARPATPSQAPLTLMTSAELXRMFVGNTTSMGTGPSRRPGPCQQPAPSCITSGVLRGTSAPERPPCPGPTSEPLVIVAPASAGATAHGVTAARSVAEVTSPAWCSAPSTMRPTPTTCASASHGQLTGVPAIFTLARRPSAGLLGWWRTWLCMGPQGCSSPLGPCTRGLQSPPRMAGRQGHGHPAQPPVEEAPSPAPCTASRLTGPASRRPWRRLSVPGCLGSPLPFRPVTCSAVQPGARSPGESVLSVVALASGSGALLAGVKGVLCSIPQRAPWKTGHL

SEQ ID NO: 13398 - protein, 514 aa, Homo sapiens
  DOMAIN (35)..(133): Phosphotyrosine interaction domain (PTB/PID) domain identified by PFam, accession name PID, E-value=5.5e-34, PFam score of 125.3
MVILLPGEILIYNEESPRNFSKHIISTFLNTNEPSKVKQTGKKAVKAVLWVSADGLRVVDEKTKDLIVDQTIEKVSFCAPDRNFDRAFSYICRDGTTRRWICHCFMAVKDTGERLSHAVGCAFAACLERKQKREKECGVTATFDASRTTFTREGSFRVTTATEQAEREEIMKQMQDAKKVPEVEGEAESISSLCSQITNAFSTPEDPFSSAPMTKPVTVVAPQSPTFQANGTDSAFHVLAKPAHTALAPVAMPVRETNPWAHAPDAANKEIAATCSGTEWGQSSGAASPGLFQAGHRRTPSEADRWLEEVSKSVRAQQPQASAAPLQPVLQPPPPTAISQPASPFQGNAFLTSQPVPVGVVPALQPAFVPAQSYPVANGMPYPAPNVPVVGITPSQMVANVFGTAGHPQAAHPHQSPSLVRQQTFPHYEASSATTSPFFKPPAQHLNGSAAFNGVDDGRLASADRHTEVPTGTCPVDPFEAQWAALENKSKQRTNPSPTNPFSSDLQKTFEIEL

SEQ ID NO: 13399 - protein, 166 aa, Homo sapiens
  misc_feature (1)...(166): Xaa = X or * as defined in Table 2
MPYPAPNVPVVGITPSQMVANXFGTAGHPQAAHPHQSPSLVRQQTFPHYEASSATTSPFFKPPAQHLNGSAAFNGVDDGRLASADRHTEVPTGTCPVDPFEAQWAALENKSKQRTNPSPTNAFLHVTYRRRLKLNFKQSLWLCILSIPDREQGVAVKGAKQTLCPD

SEQ ID NO: 13400 - protein, 644 aa, Homo sapiens
  DOMAIN (43)..(165): Phosphotyrosine interaction domain (PTB/PID) domain identified by PFam, accession name PID, E-value=9.3e-47, PFam score of 168.8
VKIKMNKLRQSFRRKKDVYVPEASRPHQWQTDEEGVRTGKCSFPVKYLGHVEVDESRGMHICEDAVKRLKATGKKAVKAVLWVSADGLRVVDEKTKDLIVDQTIEKVSFCAPDRNFDRAFSYICRDGTTRRWICHCFMAVKDTGERLSHAVGCAFAACLERKQKREKECGVTATFDASRTTFTREGSFRVTTATEQAEREEIMKQMQDAKKAETDKIVVGSSVAPGNTAPSPSSPTSPTSDATTSLEMNNPHAIPRRHAPIEQLARQGSFRGFPALSQKMSPFKRQLSLRINELPSTMQRKTDFPIKNAVPEVEGEAESISSLCSQITNAFSTPEDPFSSAPMTKPVTVVAPQSPTFQANGTDSAFHVLAKPAHTALAPVAMPVRETNPWAHAPDAANKEIAATCSGTEWGQSSGAASPGLFQAGHRRTPSEADRWLEEVSKSVRAQQPQASAAPLQPVLQPPPPTAISQPASPFQGNAFLTSQPVPVGVVPALQPAFVPAQSYPVANGMPYPAPNVPVVGITPSQMVANVFGTAGHPQAAHPHQSPSLVRQQTFPHYEASSATTSPFFKPPAQHLNGSAAFNGVDDGRLASADRHTEVPTGTCPVDPFEAQWAALENKSKQRTNPSPTNPFSSDLQKTFEIEL

SEQ ID NO: 13401 - protein, 70 aa, Homo sapiens
  misc_feature (1)...(70): Xaa = X or * as defined in Table 2
NSLIAGYILVYVKTPRTQKEKSFLKVLSTYIKVAKYKVXILKSITFLFTTKEYSKINIKMPFTTPFTTPN

SEQ ID NO: 13402 - protein, 643 aa, Homo sapiens
  DOMAIN (86)..(174): Phosphotyrosine interaction domain (PTB/PID) domain identified by PFam, accession name PID, E-value=3.1e-19, PFam score of 72.8
  misc_feature (1)...(643): Xaa = X or * as defined in Table 2
GLSNFFRGRVPVQPLLQFKILIYIHRLEYWWASNPQTPHLGQAVKIKMNKLRQSFRRKKDVYVPEASRPHQWQTDEECARTGKCSFPANDLGHAEFFESRGMHICEDAVKRLKATGKKAVKAVLWVSADGLRVVDEKTKDLIVDQTIEKVSFCAPDRNFDRAFSYICRDGTTASHGFCRCFMAVKDTQGERVEHMQXICAFAALFRRARQKREKECGVTATFDASRTTFTREGSFRVTTATEQAEREEIMKQMQDAKKAETDKIVVGSSVAPGNTAPSPSSPTSPTSDATTSLEMNNPHAIPRRHAPIEQLARQGSFRGFPALSQKMSPFKRQLSLRINELPSTMQRKTDFPIKNAVPEVEGEAESISSLCSQITNAFSTPEDPFSSAPMTKPVTVVAPQSPTFQGTEWGQSSGAASPGLFQAGHRRTPSEADRWLEEVSKSVRAQQPQASAAPLQPVLQPPPPTAISQPASPFQGNAFLTSQPVPVGVVPALQPAFVPAQSYPVANGMPYPAPNVPVVGITPSQMVANVFGTAGHPQAAHPHQSPSLVRQQTFPHYEASSATTSPFFKPPAQHLNGSAAFNGVDDGRLASADRHTEVPTGTCPVDPFEAQWAALENKSKQRTNPSPTNPFSSDLQKTFEIEL

SEQ ID NO: 13403 - protein, 605 aa, Homo sapiens
  DOMAIN (39)..(172): Phosphotyrosine interaction domain (PTB/PID) domain identified by PFam, accession name PID, E-value=4.9e-45, PFam score of 163.0
MNKLRQSFRRKKDVYVPEASRPHQWQTDEESVRTGKCSFPVKYLGHVEVDESRGMHICEDAVKRLKAQRKFFKGFFGKTGKKAVKAVLWVSADGLRVVDEKTKDLIVDQTIEKVSFCAPDRNFDRAFSYICRDGTTRRWICHCFMAVKDTGERLSHAVGCAFAACLERKQKREKECGVTATFDASRTTFTRERSFRVTTATEQAEREEIMKQMQDAKKAETDKIVVGSSVAPGNTAPSPSSPTSPTSDATTSLEMNNPHAIPRRHAPIEQLARQGSFRGFPALSQKMSPFKRQLSLRINELPSPTMQRKTDFPIKNAVPEVEGEAESISSLCSQITNALSPPEDPFSSAPMTKPVTVLAPQSPTFQGNEWGHSSGAASPGLFQAGHRRTPSEADRWLEEVSKSVRAQQPQAPAAPLQPVLQPPPPTAISQPASPIQGNAFLTSQPVPVGVVPAHMQPAFVPAQSYPVANGMPYPAPNVPVVGITPSQMVANVFGTAGHPQAAHPHQSPSLVRQQTFPHYEASSATTSPFFKPPAQHLNGSAAFNGVDDGRLASADRHTEVPTGTCPVVPFEAQWAALENKSKQRTNPSPTNPFSSDLQKTFEIEL

SEQ ID NO: 13404 - protein, 39 aa, Homo sapiens
LMKYIYSKKESNHLKMFLITKIKSILKALSPFVIRTLPN

SEQ ID NO: 13405 - protein, 27 aa, Homo sapiens
HCSGIQRFIHCLLIVKMHRALWKHSLG

SEQ ID NO: 13406 - protein, 81 aa, Homo sapiens
  DOMAIN (2)..(51): kw TRANSCRIPTASE REVERSE II ORF2 domain identified by eMATRIX, accession number DM01354Z, p-value=8.742e-13, raw score of 9.06
FFFFFNRGFIAALFKITKIWKQPRCPSVSEWDKLWYYTIEHNSALKRNGLSCPQKMRKLKSILLSKRRQSEKATYYITATM

SEQ ID NO: 13407 - protein, 100 aa, Homo sapiens
GLTMDTQKDVQPPKQQPMIYICGECHTPENEIKSRDPIRCRECGYRIMYKKRTKRLGRFLMARWNAGEFQREWPSPYTLGFGSLPHFWIVCYSFSIFALQ

SEQ ID NO: 13408 - protein, 418 aa, Homo sapiens
  misc_feature (1)...(418): Xaa = X or * as defined in Table 2
NSLILLFFFFFRQRSLTLECSGVISAHHNLHLPSSSNSPASASXVAGITGMHRHAWPICIFLVETGFRHVGQAGLELLTSGDPPAPTSQSMXATTSGLILLLSKILFPFHSTKVFKXSCPSXKILKEENCSVINEWFNSESSYTSKEKNNLVPNACXEITMXVATNCDFTSLLXRSENYPKLFHNNETTSQKIHLKIKISRPATSGQWILFSLVWWRARKGXGILMIHNGILYXTICXIKLHRLPXGMDYPNQPDMKSGWDKRMSHTLXFXGKEIVFDFQNQQNKLSTLYLSVQEXXHEEFFFRDLKYNKPGSTIKSLVSFHSLTLFFFFFFEARSHSASQAGVQWGNIGSLQPAPPGLKRSSYLSLLSSWDYRRVPPHPANFCIFCRGWGFGVSPCCPGSSGTPVLKWRAHLSLPNC

SEQ ID NO: 13409 - protein, 210 aa, Homo sapiens
KYRQDLTVPPGYCTGEQGAGGRPGETEPWLRPPALLPSDFLLCASSSGAVLPVRTQDPFLPYPPRACPQGQAASSATTSRPCPEVKEAGWGSPGHLARHALSHVPPPARVVLVLRERWHFCGDGRVLLGSRALRERHLGLMGYQLLPGEWPWPGPWRILTPSLRVTCRPLLSPQLPFEELESQRGLCPQLKSYLRQKLQALGLRWGPEGG

SEQ ID NO: 13410 - protein, 103 aa, Homo sapiens
  DOMAIN (15)..(28): Protein phosphatase 2C proteins domain identified by eMATRIX, accession number BL01032H, p-value=8.200e-09, raw score of 11.25
EVRVYDLTQYEHCPDDVLVLGTDGLWDVTTDCEVAATVDRVLSAYEPNDHSRYTALAQALVLGARGTPRDRGWRLPNNKLGSGDDISVFVNPPGRARQLLLRG

SEQ ID NO: 13411 - protein, 38 aa, Homo sapiens
EGPHDLCCVHVLLCGDEPRIQKLPEHGWSAVLSFLLQK

SEQ ID NO: 13412 - protein, 65 aa, Homo sapiens
  misc_feature (1)...(65): Xaa = X or * as defined in Table 2
MAKDAGLIEANGELKVFIDQNLSPGKGVVSLVAVHPSTVNPLGKQLLPKTFGQSNVNIAQQVVIX

SEQ ID NO: 13413 - protein, 43 aa, Homo sapiens
KALISPFSLPLSVVPSSPTMASSTSLPSNCSSSSGIFSFSPAN

SEQ ID NO: 13414 - protein, 288 aa, Homo sapiens
MAGVPVGSTQPPPCQPQKILKERLSSPKTEGALNEPTIDYGFQRLQKVIPRHPGDPERLPKLGEPPWSISSSSNPTRVLAALVGRATCQNWPCLGEIHPSGHYTEPLDRARAGRSPPQEALSVTQSRVAVLLALNVKVEREFKGRHHSPSTFHGALVLEDANECYQKEVGVSHSVIFGKDWMTYIKPLLCQAHIVILQTGDSLFPTPMGKTWSFLYPGFLPWCSGRIGSRVGLENECKVSLSGSSSQPMGEPEGRWSSPEVGPLASPGSPLIAWAKLRFVPPVDDLPV

SEQ ID NO: 13415 - protein, 267 aa, Homo sapiens
YIVTTLRQLGTRGTPGRFIYTALNEPTIDYGFQRLQKVIPRHPGDPERLPKEVILKRAADLVEALYGMPHNNQEIILKRAADIAEALYSVPRNHNQLPALANTSVHAGMMGVNSFSGQLAVNVSEASQATDQGFTRNSSSVSPHGYVPSTTPQQTNYNSVTTSMNGYGSAAMSNLGGSPTFLNGSAANSPYAIVPSSPTMASSTSLPSNCSSSSGIFSFSPANMVSAVKQKSAFAPVVRPQTSPPPTCTSTNGNSLQAISGMIVPPM

SEQ ID NO: 13416 - protein, 175 aa, Homo sapiens
LEGHCHNLSSLQISASLGFKRFSCLTSPSSWDSRNTPPCPANFCEFLVENGFHHVGQAGLKLLTSSHPPSMASQSAGITGMSHQAWPTFPVLINFNSLKMCRMCPMATHLGQCPSREYKIHSCSCAELEGQAHHEPDVGVTISIRKCPVPNALWWKELVPGAQGHGPHLEPEGLG

SEQ ID NO: 13417 - protein, 490 aa, Homo sapiens
  misc_feature (1)...(490): Xaa = X or * as defined in Table 2
RSDATNWGLSHLCFWFWFLFLRLSFLFSLPRLECNVTISAHCNLFCLLGSSNSPVSASLVAGITGTRHHAQLILLYFFFFLVKTRFHHVDQADLELLTSGDPPTSASQSAGITGVSHCARLSHLCFLPPCLLFYCYFIYVMLLCYXWSLFLVAQVGVQWHDLSSLQPLPPGFKXFSCLSLLSSWEYRRSPPHPANFFFFFFLRRRSRFVAQVGVQWCNLDSLQPPPPSFKHFSASACRVAGITVACHHAWLIFIFLYFXXRQGFTILARLVLNSXPRDPPPSASQSAEITGVSHHAWPILFIYLRQSLDSVAQAGVQWYNLGSLQPPPPGFKQFSCLSFLSSWDYRRVPPCPANFLCFXXRQDFTMLARLVSISXPHDLPASASQSAEITGVSHRAWPIFCIFFCFFEMESRSVAQAGVQWRDLGSLQAPPPGFTPFSCLSLPSSWDYRCPPPRPANFCIFSRDGVSPWSLSPDLVICLPRPPKVLGLQA

SEQ ID NO: 13418 - protein, 198 aa, Homo sapiens
  misc_feature (1)...(198): Xaa = X or * as defined in Table 2
DPVSTKNTQISHMWWCTPVVPATQEAEAREFLENFLSPSTGFECSSLFFFFFFFFLSQGSHSVTQAGVQWCDHGSLQPQPPGRKPSSPLCLLSSWDNHRPANFFYKTTVKSPEEFLQLAVVGCFACARVYSAFQTEKPQHSSSVGLHRSSFEISAFSHFPIXVFVPWPSPPLQYEEPTLSFPPSSSIPHCPSTSPPND

SEQ ID NO: 13419 - protein, 516 aa, Homo sapiens
  misc_feature (1)...(516): Xaa = X or * as defined in Table 2
ATAPGQIFFFFFFLRWSLTLSPRLECSDAIMAHCNLKLLGSRNPPTSASXVAKDYSTHQQAWLISYFFFIETGFRHVAKAGLKLLTSSDPPAPASQSAGIKRVRHHVWPSFSYVNKHLFSRGLRALSYKLKXQMQLFFNFLSILSHDFVAVPSCHDHLRSPETCHXXCSVTHLEGLQVHFXLXDVIPVLIQGVSLNSSSSSFLEESQXDNLILSREWGSHSNLSYSKVIMXHLTATSSCDTELASASVXVLSXPLXLRLSRXSFXTFLWLLFRDRIIQIIFCLFLKRWSLDSVTQAGVQWRNHGSLQPQTPGLGSDTESFFFXARVSLCHPGLEVQWCNHGSLQASNSXAQVILPPXLPNXLRLQACTIMPGXFCFXILVEMGLAMMPSLVSNSXAQCNHPVLASQSSGITGMRHCARLGRESXFDPLHXTVCPICNFFFFLRRSFALVAQAGVQWRDLSSLQPLPLGFRXFSCLSLLSSWDYGHPSLRSANFCVFLVEMGVSPCWTGWSXTPDLR

SEQ ID NO: 13420 - protein, 68 aa, Homo sapiens
LEHALRPSSKMLLKCSQGGTPQEPPNPRIKRASSLNFLNKSVEDPTQHGGQVFLSAALSAPAPWTSPH

SEQ ID NO: 13421 - protein, 138 aa, Homo sapiens
  DOMAIN (18)..(54): C1q domain proteins domain identified by eMATRIX, accession number BL01113B, p-value=9.775e-24, raw score of 18.26
  DOMAIN (2)..(132): C1q domain identified by PFam, accession name C1q, E-value= 7.9e-18, PFam score of 72.1
SAFSVAVTKKLPTGAACPIKFTKILMNEGGHYNASSGKFRCGVLGIYYFHLHITLGNKDLAIGLGAQRPSTASGPLMPNTGNHDVGSGSTILALKQGDEVWLQIFYSEQNGLFYDPYWTDSLFTGFLIYADQDDPNEV

SEQ ID NO: 13422 - protein, 69 aa, Homo sapiens [sequence omitted]

SEQ ID NO: 13423 - protein, 140 aa, Homo sapiens
  misc_feature (1)...(140): Xaa = X or * as defined in Table 2
GVYLKLSINTVGKDKEKVRRHHPITTQLQCGIQGHNLWVVTAASEIRSFHLSPSSRFRRFKSIFCHVTRSGKSMLQMFTFPEKKNDFSGCPVRPRGRGRGEGAVRSAGRRGXARAGAGPGGPGRGGVPALGRVAPGLVPN

SEQ ID NO: 13424 - protein, 114 aa, Homo sapiens
PTEYENLFPCIKEAFVVEEWVKETLAVLWPAKQYPFVTPIEERILMEEGKAFPPSRSTAKQKLDGNPVSPTPVIGLSPTPNKEEKQPDPWPLEPTGHLDGARDTAGPSWLHHRF

SEQ ID NO: 13425 - protein, 106 aa, Homo sapiens
  misc_feature (1)...(106): Xaa = X or * as defined in Table 2
KIFFFFFFLPPQFKILFKRPTGLRVPGKGRRALGGSPKGAKKAWPTRRLPSFNGYLEGSSNGASTESPGNFVPGKTLQPPGVELGRGRWTAQGQPSRPVALGAXKL

SEQ ID NO: 13426 - protein, 72 aa, Homo sapiens
  misc_feature (1)...(72): Xaa = X or * as defined in Table 2
EKGFWFCAQGGKNLPGGNSLEPSASGLKEIFGLNLLNNWEXRGGPKTPGNFWIWKKGGVXPLWPGWGXNPGL

SEQ ID NO: 13427 - protein, 20 aa, Homo sapiens
MKALPSSQSCGPTSVNSPFH

SEQ ID NO: 13428 - protein, 22 aa, Homo sapiens
MKACHLGTPQFTGVSCGVQKAF

SEQ ID NO: 13429 - protein, 144 aa, Homo sapiens
  misc_feature (1)...(144): Xaa = X or * as defined in Table 2
MQVETGRGLGVGRREGRQGLAKPRQLPESLLHSARHPSKLGRPKVASLHEGTAQLTILWANFSQLSFPLDLFLIKRPLXXXXXXXXXXXXXXXXXXXXXXXXXXXXXXXXXXXXXXXXXXXXXXXXXXXXXXXRSSKLXRDDHA

SEQ ID NO: 13430 - protein, 26 aa, Homo sapiens
FLHFYFQTYSKQNNHLNCQKNSNFTQ

SEQ ID NO: 13431 - protein, 106 aa, Homo sapiens
  misc_feature (1)...(106): Xaa = X or * as defined in Table 2
GCAVFFFFFFFLRWSLLPRLECSGTVSAHCNLHLLGSSSSRAAASQVAGTTGMHHHARLIFVFLVEMGFHHVSNSXPQAIHPPQRPKVLGIIGRDNRHLGLMEWSF

SEQ ID NO: 13432 - protein, 133 aa, Homo sapiens
  DOMAIN (27)..(49): Globins profile domain identified by eMATRIX, accession number BL01033A, p-value=1.000e-16, raw score of 16.94
  DOMAIN (5)..(110): Globin domain identified by PFam, accession name globin, E- value=4.2e-39, PFam score of 140.8
  misc_feature (1)...(133): Xaa = X or * as defined in Table 2
DTMVHLTPVEKGAVTALWGKVNVDEVGGEALGRLLVGYPWTQRFFESFGDLSTPDAVMGNPKVKAHGKKVLGAFSDGLAHLDNLKGTFATLSELHWDKLHVDPXNFRLLGNGLDXMLAHKFGKKISPNQGKLG

SEQ ID NO: 13433 - protein, 107 aa, Homo sapiens
MARKCSVAFSGGPGCTWDNLKGTFAHTEVSLHCDKAAPWIPEELSGSWGNVAWSCVLGPFTFGKRISTPPVAGLPNQENWLAWCWLNALGPTSNHLSLAFLAGPISN

SEQ ID NO: 13434 - protein, 61 aa, Homo sapiens
  misc_feature (1)...(61): Xaa = X or * as defined in Table 2
GFFQGAQKKRVHPKGPPGKSRFXKFFRAGPGGSIWNPHHLGGPGGPNCWPPGFQTPPNNPG

SEQ ID NO: 13435 - protein, 112 aa, Homo sapiens
  DOMAIN (38)..(83): kw TRANSCRIPTASE REVERSE II ORF2 domain identified by eMATRIX, accession number DM01354N, p-value=3.842e-17, raw score of 13.17
  misc_feature (1)...(112): Xaa = X or * as defined in Table 2
IKKALXHEXLREKKKSPIRTSQSSKAPXNLPRSSSSSESSNNYQLLXAHKLQKVKEMGKLLETPNLPLLSQKVAEPLNQPITSSKIETLIKKPYHPEKSYGHDEVTAKFSRA

SEQ ID NO: 13436 - protein, 783 aa, Homo sapiens
  DOMAIN (587)..(602): G-PROTEIN BETA WD-40 REPEAT SIGNATURE domain identified by eMATRIX, accession number PR00320A, p-value=5.320e-12, raw score of 16.74
  DOMAIN (456)..(783): WD domain, G-beta repeat domain identified by PFam, accession name WD40, E-value=1.7e-36, PFam score of 134.6
AAAMDEQAGPGVFFSNNHPGAGGAKGLGPLAEAAAAGDGAAAAGAARAQYSLPGILHFLQHEWARFEVERAQWEVERAELQAQIAFLQGERKGQENLKKDLVRRIKMLEYALKQERAKYHKLKYGTELNQGDMKPPSYDSDEGNETEVQPQQNSQLMWKQGRQLLRQYLQEVGYTDTILDVKSKRVRALLGFSIDVTDREDDKNQDSVVNGTEAEVKETAMIAKSELTDSASVLDNFKFLESAAADFSDEDEDDDVDGREKSVIDTSTIVRKKALPDSGEDRDTKEALKEFDFLVTSEEGDNESRSAGDGTDWEKEDQCLMPEAWNVDQGVITKLKEQYKKERKGKKGVKRPNRSKLQDMLANLRDVDELPSLQPSVGSPSRPSSSRLPEHEINRADEVEALTFPPSSGKSFIMGADEALESELGPGELAGLTVANEADSLTYDIANNKDALRKTWNPKFTLRSHFDGIRALAFHPIEPVLITASEDHTLKMWNLQKTAPAKKSTSLDVEPIYTFRAHKGPVLCVVMSSNGEQCYSGGTDGLIQGWNTTNPNIDPYDSYDPSVLRGPLLGHTDAVWGLAYSAAHQRLLSCSADGTLRLWNTTEVAPALSVFNDIKELGIPASVDLVSSDPSHMVASFSKGYTSIFNMETQQRILTLESNVDTTANSSCQINRVISHPTLSISITAHEDRHIKFYDNNTGKLIHSMVAHLEAVTSLAVDPNGLYLMSGSHDCSIRLWNLESKTCIQEFTAHRKKFEESIHDVAFHPSKCYIASAGADALAKVFV

SEQ ID NO: 13437 - protein, 600 aa, Homo sapiens
  DOMAIN (404)..(419): G-PROTEIN BETA WD-40 REPEAT SIGNATURE domain identified by eMATRIX, accession number PR00320A, p-value=5.320e-12, raw score of 16.74
  DOMAIN (289)..(600): WD domain, G-beta repeat domain identified by PFam, accession name WD40, E-value=4.4e-30, PFam score of 113.4
YLQEVGYTDTILDVKSKRVRALLGFSSDVTDREDDKNQDSVVNGTEAEVKETAMIAKSELTDSASVLDNFKFLESAAADFSDEDEDDDVDGREKSVIDTSTIVRKKALPDSGEDRDTKEALKEFDFLVTSEEGDNESRSAGDGTDWEKEDQCLMPEAWNVDQGVITKLKEQYKKERKGKKGVKRPNRSKLQDMLANLRDVDELPSLQPSVGSPSRPSSSRLPEHEINRADEVEALTFPPSSGKSFIMGADEALESELGLGELAGLTVANEADSLTYDIANNKDALRKTWNPKFTLRSHFDGIRALAFHPIEPVLITASEDHTLKMWNLQKTAPAKKGPVLCVVMSSNGEQCYSGGTDGLIQGWNTTNPNIDPYDSYDPSVLRGPLLGHTDAVWGLAYSAAHQRLLSCSADGTLRLWNTTEVAPALSVFNDTKELGIPASVDLVSSDPSHMVASFSKGYTSIFNMETQQRILTLESNVDTTANSSCQINRVISHPTLPISITAHEDRHIKFYDNNTGKLIHSMVAHLEAVTSLAVDPNGLYLMSGSHDCSIRLWNLESKTCIQEFTAHRKKFEESIHDVAFHPSKCYIASAGADALAKVFV

SEQ ID NO: 13438 - protein, 82 aa, Homo sapiens
  DOMAIN (37)..(52): G-PROTEIN BETA WD-40 REPEAT SIGNATURE domain identified by eMATRIX, accession number PR00320B, p-value=8.548e-11, raw score of 12.19
  DOMAIN (12)..(50): WD domain, G-beta repeat domain identified by PFam, accession name WD40, E-value=0.0023, PFam score of 24.6
  misc_feature (1)...(82): Xaa = X or * as defined in Table 2
IANNKDALRKTWNPKFTLRSHFDGIRALAFHPIEPVLITASEDHTLKMWNLQKTAPAKKXEYSTLTLFEYFKXHLSILLYSI

SEQ ID NO: 13439 - protein, 37 aa, Homo sapiens
  misc_feature (1)...(37): Xaa = X or * as defined in Table 2
HETDYHKQPWQGEISGIVSTESQXWGLGGGEVKVKWE

SEQ ID NO: 13440 - protein, 94 aa, Homo sapiens
  misc_feature (1)...(94): Xaa = X or * as defined in Table 2
TIADRELRYSEDEGGRRRGEXREEEGEAARRKRVAKQVGKRANEERKTEERWGDREGRRERRSEEMEVSGKERGHATSGREEKENTGXGPRAEI

SEQ ID NO: 13441 - protein, 78 aa, Homo sapiens
  misc_feature (1)...(78): Xaa = X or * as defined in Table 2
RTRGRTRGSTHAFVRQLMQRNLDTGPIMAGHDNQLQQKENSTPDSSLPETSNKEHISPENMSLKTLRNSNPXDLYDEI

SEQ ID NO: 13442 - protein, 58 aa, Homo sapiens
  misc_feature (1)...(58): Xaa = X or * as defined in Table 2
LFGYLPKXVDNMSTKKPCTWIFTLALCITARTWKQPRCPLVGKWIRCSAEALGNRSLI

SEQ ID NO: 13443 - protein, 349 aa, Homo sapiens; identical to SEQ ID NO: 9709
  DOMAIN (157)..(203): Hexokinases proteins domain identified by eMATRIX, accession number BL00378E, p-value=7.818e-19, raw score of 22.92
  DOMAIN (172)..(343): Hexokinase domain identified by PFam, accession name hexokinase, E-value=2e-105, PFam score of 363.7

SEQ ID NO: 13444 - protein, 82 aa, Homo sapiens
  misc_feature (1)...(82): Xaa = X or * as defined in Table 2
SLCQPGWSAVADSRLTASSISQFTPFSCLSFPSSWDYRRLPPRPAIFLYFXXRRGFTVLGWSRSPDLVIRLSRPPKVLGLQV

SEQ ID NO: 13445 - protein, 143 aa, Homo sapiens; identical to SEQ ID NO: 8541
  DOMAIN (21)..(43): Globins profile domain identified by eMATRIX, accession number BL01033A, p-value=2.929e-17, raw score of 16.94
  DOMAIN (10)..(143): Globin domain identified by PFam, accession name globin, E- value=4.3e-55, PFam score of 196.4

SEQ ID NO: 13446 - protein, 111 aa, Homo sapiens
  misc_feature (1)...(111): Xaa = X or * as defined in Table 2
GIDTILTLNQNXSLKTRQXFTLIIFIFFFFLRWSLDSVAQAGVQWRDLGSLQAPPRGFTPFSCLSLPSSWDYRRPLPRPANFFYFXXRRGFTMLARMVSISXPRDLPAEFL

SEQ ID NO: 13447 - protein, 146 aa, Homo sapiens
  misc_feature (1)...(146): Xaa = X or * as defined in Table 2
KCNNSSLNMNEFKFNPFCMKPNSSLIPLGLSAIKVSNKTNTXNMITIXILWIIFFFFFLIWSLDSVAQAGAQWCHLGSLQAPPPEFTPFSCLSLPRSSWDYRHPPRPANFFVFLVERGFTVLARMVSISXPRDLPALASQSLWIIL

SEQ ID NO: 13448 - protein, 42 aa, Homo sapiens
MHRDLFFNIQFISSVYTSLYLLEKCILCKFSIKTLGLIHTMW

SEQ ID NO: 13449 - protein, 98 aa, Homo sapiens
  misc_feature (1)...(98): Xaa = X or * as defined in Table 2
IPGLKRSLHLSLLNSQSCATLPSYFFFFFFFFFYFLERRDLAMLPRLFSSSPGLKXSLHLGFPEHWDYSHEPPSWLLFFFIFNNRRVFLLNVKFYHMV

SEQ ID NO: 13450 - protein, 273 aa, Homo sapiens
  misc_feature (1)...(273): Xaa = X or * as defined in Table 2
RMNIFPWGGWPLGHSQQATLTGPPGVCSPPNPRQNKGRPSLTWKSWACGMFSICFFCSVTKTFLKLGPHQRLKSSKTTYATXDILKRKVKLCECRPSFLPFFTAWKPLRICWGVAEEGLSSLKEGMLVDSLQPRKPRRCPLPHNRLSTAPTFFDPESIPTDPVTLHPLCPKEQRPDPELPSLGEAPWRXSLPFLHSTPCSLKECETMKPHMCRSPCRGVLTPSATCAQWPDQGWGPVIPGAPFSDEVTVCNSQLLLPEAPACSGNQCLSWFKK

SEQ ID NO: 13451 - protein, 86 aa, Homo sapiens
  misc_feature (1)...(86): Xaa = X or * as defined in Table 2
LSLTQAGVQWCDHSSLQPXRLLSNWDHMHAPSCLAIYFFXETTSYYIAQSYLKHLGSSNPPTSASQGTAITGISHWARLDTSQFGH

SEQ ID NO: 13452 - protein, 73 aa, Homo sapiens
  misc_feature (1)...(73): Xaa = X or * as defined in Table 2
KSCPGTTPGNGAGASLEDLWWRSAGRWGGTSKPCPLSAGCPLAFGPPARLTGASMPPLSALNGXERRKRQPGL

SEQ ID NO: 13453 - protein, 102 aa, Homo sapiens
  misc_feature (1)...(102): Xaa = X or * as defined in Table 2
EAWRMSWGPPXERXPLPSPXGVCSSCAPPLPSVSAGLGEPRPPDVEDMSSSDSDSDWDGGSRPFTISTPRPPRLGCLLHAVLFLARWPSLPSVXPRTPHCEH

SEQ ID NO: 13454 - protein, 17 aa, Homo sapiens
MNEWTRPSCPYSPHCEP

SEQ ID NO: 13455 - protein, 143 aa, Homo sapiens
  misc_feature (1)...(143): Xaa = X or * as defined in Table 2
GNPSWSFPKAMDSPSLRELQQPLLEGTECGDPCPEAWPGMSWGPPXERXPLPSPXGVCSSCAPPLPSVSAGLGEPRPPDVEDMSSSDSDSDWDGGSRLSPFLPHDHLGLAVFSMLCCFWPVGIAAFCLAQKVSLCVGLGGDWA

SEQ ID NO: 13456 - protein, 160 aa, Homo sapiens
  DOMAIN (36)..(53): BETA HAEMOGLOBIN SIGNATURE domain identified by eMATRIX, accession number PR00814A, p-value=1.000e-22, raw score of 12.94
  DOMAIN (9)..(79): Globin domain identified by PFam, accession name globin, E- value=1.2e-24, PFam score of 90.4
  misc_feature (1)...(160): Xaa = X or * as defined in Table 2
APSPDAMGHFTEEDKATITSLWGKVNVEDAGGETLGRLLVVYPWTQRFFDSFGNLSSASAIMGNPKVKAHGKKVLTSLGRCHKSTWDDLKGTFAQLSELHCGQACMWDPENFKLLGNVLVTVLAIPFSGKEFHPWRLAGFPGQKDGXLGVASALVPSRYH

SEQ ID NO: 13457 - protein, 91 aa, Homo sapiens
YWAHGKIHSLQAGSGQSCPGTTPGNGAGASLEDLWWRSAGRWGGTSKPCPLSAGCPLAFGPPARLTGASMPPLCECPTCRRGYFPRNRWPP

SEQ ID NO: 13458 - protein, 120 aa, Homo sapiens
  misc_feature (1)...(120): Xaa = X or * as defined in Table 2
RLGEEKAATGVVVHGLDCFFSPRAPTRPGSRLSQDPPGCEIXNPSWSFPKAMDSPSLRELQQPLLEGTECEDPCPEAWAGIELGSPFKRDSLCRVPEGFCSSCSPPLPSVSAGLGGTKAP

SEQ ID NO: 13459 - protein, 117 aa, Homo sapiens
  misc_feature (1)...(117): Xaa = X or * as defined in Table 2
KTGSHSVAEAGVQWHHPSSLXPQPPGFKQSPHLRFPKCWDHRRTPPCPGNFFDLRXRWGSHHVAQAGLELLNSRDPPASTSQSARITAMSHRARPVSTFLSTSTSCPVLSTFHRSLI

SEQ ID NO: 13460 - protein, 344 aa, Homo sapiens
  misc_feature (1)...(344): Xaa = X or * as defined in Table 2
SHTLSYLVKELEVRMDLKAKMPDDHARKILLSRINNYTIPEEEIGSFLFHAINKPNAPIWLILNEAGLYWRAVGNSTFAIACLQRALNLAPLQYQDVPLVNLANLLIHYGLHLDATKLLLQALAINSSEPLDLFXAGEMAYLALKNISGALEAFRQALKLTTKCPECENSLKLIRCMQIYPFLYNITSSVCSGNCREKTLDNSHDKQKYFDNSQSLDAAEEEPSERGTDEDPAFSVENSGRDSDALRLESTVVDESHGSDEMENSDETKMSEEILALVDEFQQAWPLEGFGGALEMKGRRSRLTRNTGAEERSPGWKWPETLAMETAEVKMMKQQNGLHSRSNV

SEQ ID NO: 13461 - protein, 114 aa, Homo sapiens
  misc_feature (1)...(114): Xaa = X or * as defined in Table 2
KRVRLGWVAHTYNPSTLGGQGRRITXTQEALTSLDNIVRTHLYKKFYKLAQVWACGQTCLEGGKEGYVNMSNVHTGGQGDPCGLLGSLSLGRIFGCTWDSYRHAAIAMIFGKLK

SEQ ID NO: 13462 - protein, 38 aa, Homo sapiens
  misc_feature (1)...(38): Xaa = X or * as defined in Table 2
DRVLLYCPGWNAVVXTWLTVASASSAQAILLPQPPCLA

SEQ ID NO: 13463 - protein, 34 aa, Homo sapiens
  misc_feature (1)...(34): Xaa = X or * as defined in Table 2
RRGLAVLPRLVLNSWPQVIFLPHAPKVLGLXAQL

SEQ ID NO: 13464 - protein, 94 aa, Homo sapiens
  DOMAIN (56)..(84): !!!! PROTEIN ALU SUBFAMILY WARNING ENTRY NUCLEAR PHOSPHO domain identified by eMATRIX, accession number PD02454B, p-value= 8.759e-21, raw score of 11.61
  misc_feature (1)...(94): Xaa = X or * as defined in Table 2
RSVLCECRNSVVSQIWGNRLYLVEMYPIMKVEKWAGCCGSCLXSQHFGRLRGVDRLRSGVQGQPGQHDETPSLLKMQKWAGVWWWLPVVPACSL

SEQ ID NO: 13465 - protein, 144 aa, Homo sapiens
  misc_feature (1)...(144): Xaa = X or * as defined in Table 2
RPRRLFFLRWSFALVAQAGVQWHDLGSPQPPPPGFKXFLCLSLPSSXDYRNVPPHPANFVFLVETGFCHVGQAGFXLPTSGDLSAWASQSAGITGVSHLARQAASDFNSRDRRGSQIPSNSQDANQNMEMLNKLKDFPIVTCNT

SEQ ID NO: 13466 - protein, 151 aa, Homo sapiens
  misc_feature (1)...(151): Xaa = X or * as defined in Table 2
VLITANLIPAKQCFDCNFLSTFSSVTTEAFVFLCLLVTCVTCMNFLFIIFVHFFSRRVVFFLPILGAPCKMGILFMIQTFLPSLNIFQFGSKCIQQYRILNFYAMXSVTLFLWPIVYKYSFSTISRPTLYNRSTLLPRKDRWKGARQQTPQ

SEQ ID NO: 13467 - protein, 140 aa, Homo sapiens
  DOMAIN (18)..(40): Globins profile domain identified by eMATRIX, accession number BL01033A, p-value=2.929e-17, raw score of 16.94
  DOMAIN (7)..(140): Globin domain identified by PFam, accession name globin, E- value=4.3e-55, PFam score of 196.4
SRRHGSSLWGKVNVEDAGGETLGRLLVVYPWTQRFFDSFGNLSSASAIMGNPKVKAHGKKVLTSLGDAIKHLDDLKGTFAQLSELHCDKLHVDPENFKLLGNVLVTVLAIHFGKEFTPEVQASWQKMVTGVASALSSRYH

SEQ ID NO: 13468 - protein, 113 aa, Homo sapiens
  misc_feature (1)...(113): Xaa = X or * as defined in Table 2
FKRQSLTLTPRPEYSGTIIAHYNLKLLCSSNPPSSASQEAGTTGTYHDTXLIFXFFVETGSPYVAHAGLELPVSSNPPTSASQSGRIIDMSHHIRKTALLSGKEWTRPPTHLL

SEQ ID NO: 13469 - protein, 68 aa, Homo sapiens
  misc_feature (1)...(68): Xaa = X or * as defined in Table 2
ARGDPESTVAEAFTPTIPHCSMATLIGLPIKVKLLRSLPQSFKVSWSXAPGVRPGIEGLLLRMGTGRA

SEQ ID NO: 13470 - protein, 30 aa, Homo sapiens
  misc_feature (1)...(30): Xaa = X or * as defined in Table 2
RWLIPISPALXEAEAGRLLETRSLRPAWST

SEQ ID NO: 13471 - protein, 95 aa, Homo sapiens
  misc_feature (1)...(95): Xaa = X or * as defined in Table 2
RQGFPLCNHKGTVTADLQPLPPGLKXISHLSLLSSWNYRCTPPHPADFXFFVERRSHYVAXACLELLCSSDLPALISQRVGITGMSTTPGPICLL

SEQ ID NO: 13472 - protein, 125 aa, Homo sapiens
  DOMAIN (5)..(80): Elongation factor Tu family domain identified by PFam, accession name GTP_EFTU, E-value=5.1e-06, PFam score of 22.9
  misc_feature (1)...(125): Xaa = X or * as defined in Table 2
AGFTAHVIILNHPGQXSAGYAPVLDCHTAHIACKHAELNEQIDRRSAKKLEHGPNFLNSGDAAIDDMDTVKPMCVESFSHYSPFGRFADRDMRHTVAASVIMALDKKAAVAGKGSNSGQKAHKAK

SEQ ID NO: 13473 - protein, 242 aa, Homo sapiens
  DOMAIN (201)..(215): GTP-binding elongation factors proteins domain identified by eMATRIX, accession number BL00301C, p-value=8.200e-15, raw score of 11.73
  DOMAIN (7)..(204): Elongation factor Tu family domain identified by PFam, accession name GTP_EFTU, E-value=4.2e-36, PFam score of 124.3
  misc_feature (1)...(242): Xaa = X or * as defined in Table 2
NASGTTLLEALDCILPPTRPTDKALRLPLQDVYKIGGIGTVPVGRVETGVLKPGMVVTFAPDNVTTEVXSVXLSHEALSEALPGDNVGAFNVKNVSVKDVRRGNVAGDSKNDPPQEAAGFTAHGIILNHPGQINAGYAPVLDCHTAHIACKYAELKEKIDRRSGKKLEDGPKFLKSGDAAIVDMVPGKPMCVESFSDYPPLGRFAVRDMRQTVAVGVIKAVDKKAAGAGKVTKSAQKAHKAK

SEQ ID NO: 13474 - protein, 98 aa, Homo sapiens
  misc_feature (1)...(98): Xaa = X or * as defined in Table 2
PVFLFCFVLFETESRSVAQAGVQWRDLGSLQALPPGSTPFSCLSLPGGWDYRCPPPCSANFFCIFSRDRVSPCXPGWSQFPDLMIRRARPLFLKNRKL

SEQ ID NO: 13475 - protein, 415 aa, Homo sapiens
  DOMAIN (47)..(96): KINASE DEHYDROGENASE TRANSFERASE domain identified by eMATRIX, accession number PD01976B, p-value=1.000e-40, raw score of 15.19
MKAARFVLRSAGSLNGAGLVPREVEHFSRYSPSPLSMKQLLDFGSENACERTSFAFLRQELPVRLANILKEIDILPTQLVNTSSVQLVKSWYIQSLMDLVEFHEKSPDDQKALSDFVDTLIKVRNRHHNVVPTMAQGIIEYKDACTVDPVTNQNLQYFLDRFYMNRISTRMLMNQHILIFSDSQTGNPSHIGSIDPNCDVVAVVQGKFPDQPIHIVYVPSHLHHMLFELFKAGPTPNSAVQVQNSCRWYGSIQSPECAKSTNAMRATVEHQENQPSLTPIEVIVVLGKEDLTIKISDRGGGVPLRIIDRLFSYTYSTAPTPVMDNSRNAPLAGFGYGLPISRLYAKYFQGDLNLYSLSGYGTDAIIYLKALSSESIEKLPVFNKSAFKHYQMSSEADDWCIPSREPKNLAKEVAM

SEQ ID NO: 13476 - protein, 82 aa, Homo sapiens
  DOMAIN (5)..(35): KINASE DEHYDROGENASE TRANSFERASE domain identified by eMATRIX, accession number PD01976F, p-value=7.863e-18, raw score of 10.47
  misc_feature (1)...(82): Xaa = X or * as defined in Table 2
FPDQPIHIVYVPSHLHHMLFELFKVXYFTIIEILPFKKGLTSYIFISFIIRHKTEASISFPKNASSPPKRKKLYSQCLTKYM

SEQ ID NO: 13477 - protein, 485 aa, Homo sapiens
  DOMAIN (121)..(170): KINASE DEHYDROGENASE TRANSFERASE domain identified by eMATRIX, accession number PD01976B, p-value=1.000e-40, raw score of 15.19
  DOMAIN (207)..(439): Histidine kinase domain identified by PFam, accession name signal, E-value=0.083, PFam score of -58.9
RLELESRTTASPTLPRLFTPRHPQTPAQAGAHKPASAPAVLARTRRAPSEPGSAPSSLRPSSQPQSPPGRVGVKMKAARFVLRSAGSLNGAGLVPREVEHFSRYSPSPLSMKQLLDFGSENACERTSFAFLRQELPVRLANILKEIDILPTQLVNTSSVQLVKSWYIQSLMDLVEFHEKSPDDQKALSDFVDTLIKVRNRHHNVVPTMAQGIIEYKDACTVDPVTNQNLQYFLDRFYMNRISTRMLMNQHILIFSDSQTGNPSHIGSIDPNCDVVAVVQDAFECSRMLCDQYYLSSPELKLTQVNGKFPDQPIHIVYVPSHLHHMLFELFKNAMRATVEHQENQPSLTPIEVIVVLGKEDLTIKISDRGGGVPLRIIDRLFSYTYSTAPTPVMDNSRNAPLAGFGYGLPISRLYAKYFQGDLNLYSLSGYGTDAIIYLKALSSESIEKLPVFNKSAFKHYQMSSEADDWCIPSREPKNLAKEVAM

SEQ ID NO: 13478 - protein, 187 aa, Homo sapiens
  DOMAIN (43)..(65): Globins profile domain identified by eMATRIX, accession number BL01033A, p-value=2.929e-17, raw score of 16.94
  DOMAIN (21)..(136): Globin domain identified by PFam, accession name globin, E- value=1.9e-34, PFam score of 124.5
HSLSGTSEVINKLLVQTAMGHFTEEDKATITSLWGKVNVEDAGGETLGRLLVVYPWTQRFFDSFGNLSSASAIMGNPKVKAHGKKVLTSLGDAIKHLDDLKGTFAQLSELHCDKLHVDPENFKLLGNMLLVTVLGNPIFGKEFHPWRLQASWQKQKMAEDGDCSWPVPCSSRLPLSSLAHDGRVFQG

SEQ ID NO: 13479 - protein, 79 aa, Homo sapiens
  misc_feature (1)...(79): Xaa = X or * as defined in Table 2
MIYKEKRESVSKEDLARATLVTITNNIGSVARMCAVNEKINRVVFVGNFLRVNTLSMKLLGICTGLLVKRSTKSIVSXT

SEQ ID NO: 13480 - protein, 687 aa, Homo sapiens
  DOMAIN (52)..(95): Ribosomal protein L10e proteins domain identified by eMATRIX, accession number BL01257A, p-value=1.000e-40, raw score of 11.15
  DOMAIN (51)..(209): Ribosomal L10 domain identified by PFam, accession name Ribosomal_L10e, E-value=1.9e-64, PFam score of 227.5
  misc_feature (1)...(687): Xaa = X or * as defined in Table 2
MGYGVTAFFIWAFSRVLSSCPASKKNELMLTAMDICALSLRCATEDPGVAMGRRPACCYRYCKNKPYPKSRFCRGVPDAKIRIFDLGRKKAKVDEFPLCGHMVSDEYEQLSSEALEAARICANKYMVKSCGKDGFHIRVRLHSFHVIRINKMLSCAFRAHASKCFQNFGNMIYKEKRESVSKEDLARATLVTITNNIGSVARMCAVNEKINRVVFVGNFLRVNTLSMKLLAYALDYWSKGQLKALFLEHEVCVETVNDGQFHSVELVTLNQTLNLVVDKGTPKSLGKLQKQPAGGINSPLYLGAFPWFGMDIGGTLVKLSYFEPIDITAEEEQEEVESLKSIRKYLTSNVAYGSTGIRDVHLELKDLTLFGRRGNLHFIRFPTQDLPTFIQMGRDKNFSTLQTVLCATGGGAYKFEKDFRTIGNLHLHKLDELDCLVKGLLYIDSVSFNGQAECYYFANASEPERCQKMPFNLDDPYPLLVVNIGSGVSILAVHSKDNYKRVTGTSLLTGCESFEEALEMASKGDSTQADKLVRDIYGGDYERFGLPGWAVASSFGNMIYKEKRESVSKEDLARATLVTITNNIGSVARMCAVNEKINRVVFVGNFLRVNTLSMKLLAYALDYWSKGQLKALFLEHEFGYNIGVISSSXDSHTGLSQLHFEREVRRLSLXGFAHVPLALVCGHLPQW

SEQ ID NO: 13481 - protein, 175 aa, Homo sapiens
  DOMAIN (13)..(56): 43 Kd postsynaptic protein domain identified by eMATRIX, accession number BL00405D, p-value=9.631e-09, raw score of 6.60
  misc_feature (1)...(175): Xaa = X or * as defined in Table 2
ILAVHSKDNYKRVTGTSLGGGTFLGLCSLLTGCESFEEALEMASKGDSTQADKLVRDIYGGDYERFGLPGWAVASSFGNMIYKEKRESVSKEDLARATLVTITNNIGSVARMCAVNEXINRVVFVGNFLRVNTLSMKLLAYALDYWSKGQLKALFLEHEGYFGAVGALLGLPNFS

SEQ ID NO: 13482 - protein, 61 aa, Homo sapiens
  misc_feature (1)...(61): Xaa = X or * as defined in Table 2
RNGLRYRQPIXCLIAENFPGLARDIDIWKLETQGVPNRFNLKRSSQRQMIVKLSKVKNREF

SEQ ID NO: 13483 - protein, 58 aa, Homo sapiens
  misc_feature (1)...(58): Xaa = X or * as defined in Table 2
EMGKGIDSLFNEIIAENFPGLARDIDIWKLETQGVPNRFNLKRSSQRQMIVRLSXVKI

SEQ ID NO: 13484 - protein, 156 aa, Homo sapiens
  misc_feature (1)...(156): Xaa = X or * as defined in Table 2
GTDVGKVKAAHALSHKKLCLKMTQVTTQWLEILQRLCLHDQLSVQHRGLVIAYNLLAADAELAKKLVESELLEILTVVGKQEPDEKKAEVVHTARECLIKCMDYGFIKPVSXTATLRDAGSGPVLCRVLGWLGSPGESGHLGIIAVTMKSQYKGKT

SEQ ID NO: 13485 - protein, 216 aa, Homo sapiens
  misc_feature (1)...(216): Xaa = X or * as defined in Table 2
HSERGRQRKRVRQKTDTVREKGRERERQTGREREXDRRQTQXDRQRGRERDKDRDRDREKERDRQTEKETQRERQRRTERNRQREGPSPVAIQCLFFHFLFLFFSFFLSCISVCMDVCMYVCMYVCMYVCVYLFMYRIYLETGSHSVAQACSAVVRSLGHCSLRLPGSSHSSPPASRVAGVTGACPTAPDSISYFQVRDGGFTTLARAGLELLTSG

SEQ ID NO: 13486 - protein, 281 aa, Homo sapiens
  misc_feature (1)...(281): Xaa = X or * as defined in Table 2
EEIAVSILLPSALPAPATVGPAVALVDGLGGWLCQCQAREQPAEXQPGVLVPPGGRERQGGCSFRGQSLALLSSADFTEGPGYKPHSLSKENLVKIIQLDKKPQEGVFPTLGVSMRIKGRDCRLSSIRSPRVLSPADRFSMCFPTVKDSVQRTSASAPSSLMIQAAEEKCHSSEXPTASGSPQQHQTHPGATGPAPLQVETQYTRLSSGLAGPRTLSNESECSKPTLEPKAFWVNKAKFCLCYLVVSPQLIPRHHGSDMGSGHTFEIPLLARKGCPRQAVW

SEQ ID NO: 13487 - protein, 81 aa, Homo sapiens
  misc_feature (1)...(81): Xaa = X or * as defined in Table 2
YHSQRCRRGVIIVLSKSKARSRRSRMKQYKNETVKDKGKYHKNVSMISLKXLEKPVRPLELYYYYYYYYYYYYYYYWQVLS

SEQ ID NO: 13488 - protein, 131 aa, Homo sapiens
  misc_feature (1)...(131): Xaa = X or * as defined in Table 2
QRDLTRHISLKSKTGVHLPEPNLNSARRIRNISGHRKSETEKESGLXPALRQILNASWRKVIWEQVIQLVSXTTRELRRGXLSVGIDDVGVEVTVLVVVFLCSSTIVALLCFSYVSCLCPCWCLLSLCSSF

SEQ ID NO: 13489 - protein, 73 aa, Homo sapiens
  misc_feature (1)...(73): Xaa = X or * as defined in Table 2
SGVYFSFVQRLKTLTQHLILIFGFLPXEYPTLTTFFEGEIISKKHPFLTRKWDADEDVDRKHWVSKSDLCWVI

SEQ ID NO: 13490 - protein, 82 aa, Homo sapiens
  misc_feature (1)...(82): Xaa = X or * as defined in Table 2
KKARRSGVILAHCSLELPGSSGSSLFSPASSWDYRSAPPPPSNIFLLLFXGRVLTMLPRLASNSWAQAILLRWPPKVLGLQV

SEQ ID NO: 13491 - protein, 52 aa, Homo sapiens
  DOMAIN (16)..(50): kw TRANSCRIPTASE REVERSE II ORF2 domain identified by eMATRIX, accession number DM01354P, p-value=1.095e-15, raw score of 9.18
  misc_feature (1)...(52): Xaa = X or * as defined in Table 2
QKEKLXKMGAVLKSLCNASIILIRNANKCNNRRKSYQPFSFMNIDAKVLNKI

SEQ ID NO: 13492 - protein, 99 aa, Homo sapiens
  misc_feature (1)...(99): Xaa = X or * as defined in Table 2
KIMLEHLYSFFEAESRSVIQAGVQWRDLCSLQAPPPGFTPFSCLSLQSSWDYRHLPPHPTNFFCIFSRDEVSPCXPGWSRSPDVVICLPWPPKVLGLQA

SEQ ID NO: 13493 - protein, 63 aa, Homo sapiens
  DOMAIN (32)..(43): NONHISTONE CHROMOSOMAL PROTEIN HMG17 FAMILY SIGNATURE domain identified by eMATRIX, accession number PR00925D, p-value=2.500e- 10, raw score of 6.56
  misc_feature (1)...(63): Xaa = X or * as defined in Table 2
HASAHASGHASGGAEGKQAEVANQDSTEDLPAENGEAKTDDSPASDEAGENDAXSDEAGENDA

SEQ ID NO: 13494 - protein, 108 aa, Homo sapiens
  misc_feature (1)...(108): Xaa = X or * as defined in Table 2
INIRFYLQSIKASARSTQGXVSSCTKLQIFFFFFFEMESCSVTQAGVQWRNLSSLQPLPPGFKQFSCLSLPSSXDYRCPPPRPANFCIFSRDGVSPCXPGWSQTPDLR

SEQ ID NO: 13495 - protein, 65 aa, Homo sapiens
  misc_feature (1)...(65): Xaa = X or * as defined in Table 2
SPYGKSNLLEPSASRFKQFFCLGPLNNWDYRLFPPFPGNFGVFKKNRVFPFWPSLVXTPDSRGIP

SEQ ID NO: 13496 - protein, 117 aa, Homo sapiens
  DOMAIN (34)..(72): Short-chain dehydrogenases/reductases family proteins domain identified by eMATRIX, accession number BL00061B, p-value=6.276e- 13, raw score of 25.79
GWKDMFNVNVLALSICTREAYQSMKERNVDDGHIININSMSGHRVLPLSVTHFYSATKYAVTALTEGLRQELREAQTHIRATCLKPEDVAEAVIYVLSTPAHIQIGDIQMRPTEQVT

SEQ ID NO: 13497 - protein, 42 aa, Homo sapiens
  misc_feature (1)...(42): Xaa = X or * as defined in Table 2
EQTKAKCPGAHEQVNKXNNXGHHLLSPAHFSHLQLKQFDKMI

SEQ ID NO: 13498 - protein, 307 aa, Homo sapiens
  DOMAIN (8)..(26): GLUCOSE/RIBITOL DEHYDROGENASE FAMILY SIGNATURE domain identified by eMATRIX, accession number PR00081A, p-value=4.194e- 13, raw score of 10.53
  DOMAIN (7)..(187): short chain dehydrogenase domain identified by PFam, accession name adh_short, E-value=8.2e-17, PFam score of 69.3
  misc_feature (1)...(307): Xaa = X or * as defined in Table 2
MERWRDRLALVTGASGGIGAAVARALVQQGLKVVGCARTVGNIEELAAECKSAGYPGTLIPYRCDLSNEEDILSMFSAIRSQHSAVDICINNAGLARPDTLLSGSTSGWKDMFNVNVLALSICTREAYQVHEGSGMWTDGHINXHQXACLATRVLPLSVTHFYSATKYAVTALTEGLRQELREAQTHIRATWQLRREEAAAGYQAAITVKLGFCGLHPLPSTSPRPGKAQPLRRPSLLAQCISPGVVETQFAFKLHDKDPEKAAATYEQMKCLKPEDVAEAVIYVLSTPAHIQIGDIQMRPTEQVTY

SEQ ID NO: 13499 - protein, 94 aa, Homo sapiens
  misc_feature (1)...(94): Xaa = X or * as defined in Table 2
AGVQWCRLSSMQPPPRRLKLSFHLSLPSSWDYGCTPPIARLIFVETGFHHVAXAGLKLLSLSNLPTXASQSAGITGMNHQAQPVISIFKSSSFG

SEQ ID NO: 13500 - protein, 131 aa, Homo sapiens
TLTTFFEGEIISKKHPFLTRKWDAYEDVDRKHWGKFLAFYQYAKSFNSDDFDYEELKNGDYVFMRWKEQFLVPDHTIKDISGASFAGFYYICFQKSAASIEGYYYHRSSEWYQSLNLTHVPEHSAPIYEFR

SEQ ID NO: 13501 - protein, 101 aa, Homo sapiens
QFQGLITLGWIHTHPTQTSFLSSVDLHTHCSYQMMLPESVAIVCSPKFQETGFFKLTDHGLEEISSCRQKGFHPHSKDPPLFCSCSHVTVVDRAVTITDLR

SEQ ID NO: 13502 - protein, 79 aa, Homo sapiens
  misc_feature (1)...(79): Xaa = X or * as defined in Table 2
LFFSPQTHPTQTAFLSSVDLHTHCSYQMMLPESVAIVCSPKFQEXVXRAWFWVFQGGSREESLRGKGLYSCGLVLCKIP

SEQ ID NO: 13503 - protein, 56 aa, Homo sapiens
QSETLSQKKKKKKKNWYKCGGTHLLIQATREAEAELLQTGGRGCSEPRLHHSTPAW

SEQ ID NO: 13504 - protein, 43 aa, Homo sapiens
  misc_feature (1)...(43): Xaa = X or * as defined in Table 2
SMNPGSPVCVMLITRIPFCIAHAHLRCCMVLXLHHFHFRLSIC

SEQ ID NO: 13505 - protein, 73 aa, Homo sapiens
  misc_feature (1)...(73): Xaa = X or * as defined in Table 2
DRVSLCHPGGGGCSELRSCHCNLAWVTEQNFVSKQKEKKRXLLYTXLVLPMSDGLHVAQDSFECSSTQICKLS

SEQ ID NO: 13506 - protein, 142 aa, Homo sapiens
  misc_feature (1)...(142): Xaa = X or * as defined in Table 2
DHRFAPSHLADFYFFCRDGVVQXNDLDSWQAXPPGLKDHLPSSXDHRFAPSHLADFYFFCRDGVVQAGLKLLSSSNVPALASQSAGIIGVNHCTQPTLCLFKMMYLFNFCHHWVLHLPAKEIPEPVFKLPRVFYTPFNCLSK

SEQ ID NO: 13507 - protein, 34 aa, Homo sapiens
  misc_feature (1)...(34): Xaa = X or * as defined in Table 2
HIQLCRXLIHTHTHTHTHTHTQFYLFFKXXHSAC

SEQ ID NO: 13508 - protein, 70 aa, Homo sapiens
  misc_feature (1)...(70): Xaa = X or * as defined in Table 2
VDFFFFFFKLRDRVSQCCPSWKFSGXWLFTRTDHRTLPQTPGIKQSSCLSFPSRWDYKCVPQHVSSLSPS

SEQ ID NO: 13509 - protein, 69 aa, Homo sapiens
  misc_feature (1)...(69): Xaa = X or * as defined in Table 2
LLKQNKHXSRILYPTKLSFMNEREIKSFSDKHMLREFVTTRPDLQEMQKGVLNLKTKGWHAPEXNLLKA

SEQ ID NO: 13510 - protein, 183 aa, Homo sapiens
  misc_feature (1)...(183): Xaa = X or * as defined in Table 2
SGDALFPLFFLFNFRVTKLRSSLWMHLGKQLPEPPNSRPTVETQKGSSXDTPPRXSPXACFHNSLFPRFGXPTLIXQEHLTTCLLPGDFFFFFFXDRVLPCYPGWEYSAKTMAHGSPNLLEXSSHLSLPSSWDHRRMPLCLANXKKKKKFQRHGLLMLPKLVLNSWAQVIVLLWPPKVLGLQG

SEQ ID NO: 13511 - protein, 31 aa, Homo sapiens
  misc_feature (1)...(31): Xaa = X or * as defined in Table 2
APTPDAMGHLTYEDXATITSLWCKVNVDDSG

SEQ ID NO: 13512 - protein, 36 aa, Homo sapiens
  misc_feature (1)...(36): Xaa = X or * as defined in Table 2
PNLGXLNPPPPRLKHFSCLGLPSSWNKKAIACHGAK

SEQ ID NO: 13513 - protein, 24 aa, Homo sapiens
KAVDKKAAGAGKVTKSAQIAQKAK

SEQ ID NO: 13514 - protein, 111 aa, Homo sapiens
  DOMAIN (72)..(86): GTP-binding elongation factors proteins domain identified by eMATRIX, accession number BL00301C, p-value=8.200e-15, raw score of 11.73
  DOMAIN (3)..(66): Elongation factor Tu family domain identified by PFam, accession name GTP_EFTU, E-value=1.2e-10, PFam score of 38.6
QISAGYAPVLDCHTAHIACKFAELKEKIDRRSGKKLEDGPKFLKSGDAAIVDMVPGKPMCVESFSDYPPLGRFAVRDMRQTVAVGVIKAVDKKAAGAGKVTKSAQKAQKAK

SEQ ID NO: 13515 - protein, 152 aa, Homo sapiens
  DOMAIN (8)..(26): PROSTAGLANDIN D RECEPTOR SIGNATURE domain identified by eMATRIX, accession number PR00854B, p-value=7.805e-09, raw score of 7.30
  misc_feature (1)...(152): Xaa = X or * as defined in Table 2
FETRAGSIAQAGVQWCHLGLLQPPPPGLKRSSCPQPXVTWDYRRTPSSPGXFLYFLXKTGCHHVAPGCLKLVSSSDLPFLASQSAGITDRHQPPCLGPKLWTLRKLLGDIFLWFHDNLGYTLGRNTHEFSTSRAVIITVFRSFKHSTPDFSG

SEQ ID NO: 13516 - protein, 89 aa, Homo sapiens
  DOMAIN (23)..(46): LACY PROTON/SUGAR SYMPORTER SIGNATURE domain identified by eMATRIX, accession number PR00174A, p-value=4.197e-09, raw score of 8.67
  misc_feature (1)...(89): Xaa = X or * as defined in Table 2
YTFSSFLYFFTFFPLDNSKPKIFFFFFFFFFFFFKETWIVLIGLNAGYMXTTPQKXEALLGNTITHVTRLAKHSVLLTXXIEXVHDSTF

SEQ ID NO: 13517 - protein, 66 aa, Homo sapiens
  misc_feature (1)...(66): Xaa = X or * as defined in Table 2
LEHNIFLSFETDSRSVAQAGLQWCNLSSLQLLPPGFKRFSCISLVSRXKAFCGPPQLLNFTPIVQY

SEQ ID NO: 13518 - protein, 115 aa, Homo sapiens
  misc_feature (1)...(115): Xaa = X or * as defined in Table 2
FFLETEPSCSVAQVGVQWPDLGSLQPHLPRFKXFSCLSLLSSWDYRHAPPHSANLYIFSRDGVSPHWPGRSQTPDLRRPTLLSLPKRLDYSVSHRAQPWPYFRNKEEARPNPFFS

SEQ ID NO: 13519 - protein, 74 aa, Homo sapiens
KLILLKIQYFNLLMKCCFRIKGKLEEQRPERVKPFMTGAAEQIKHILANFKNYQVNTLSIWIKGLYNFNCKSKN

SEQ ID NO: 13520 - protein, 249 aa, Homo sapiens
  DOMAIN (11)..(34): Translationally controlled tumor protein domain identified by eMATRIX, accession number BL01002A, p-value=1.360e-24, raw score of 13.19
  DOMAIN (11)..(194): Translationally controlled tumor protein domain identified by PFam, accession name TCTP, E-value=1.3e-44, PFam score of 161.7
  misc_feature (1)...(249): Xaa = X or * as defined in Table 2
RRRRLPSVAIMIIYRDLISHDEMFSDIYKIREIADGLCWEVEGKMVSRTEGNIDDSLIGGNASAEGPEGEGTEQHSXSLVVDHCHRTYHLAVKASFTKEAYKKYIKDYMTINQQGNLKQQRPERSKTFYXQGAVEQIKHILAXFQKTTQSFMGENMNPDGMVALLDYREDGVVTPYMIFFKDGLRNGKNVNKCGQLFWDLSPVIINWASAWSSTQHQGLKTKWGLMVIFELLHFILDWGFILEVEAIVF

SEQ ID NO: 13521 - protein, 90 aa, Homo sapiens
  misc_feature (1)...(90): Xaa = X or * as defined in Table 2
SRSFFLSFFLFVEMECHSVAKSGMQWRNIGSLQPPPPGFNQFSFLSLPNSWDYRCLPLHLANFCIISRDKVSPCWSAWFSRSTXPTPDLK

SEQ ID NO: 13522 - protein, 32 aa, Homo sapiens
  misc_feature (1)...(32): Xaa = X or * as defined in Table 2
IPGRPWRLXSXPVILRLQPQATSGGXMVRASL

SEQ ID NO: 13523 - protein, 84 aa, Homo sapiens
  misc_feature (1)...(84): Xaa = X or * as defined in Table 2
FNSRPSLRIGLFCITCSLWDCFWCCWIHASLYSVIRSLLSFGTLVCFSLFCVAFLSFSFXVVLFFFLLFISSGFFSFVFLVFLF

SEQ ID NO: 13524 - protein, 35 aa, Homo sapiens
  misc_feature (1)...(35): Xaa = X or * as defined in Table 2
FIKIHGLPMLPRLVXNSWPQAILLPWPPKVLGLQA

SEQ ID NO: 13525 - protein, 63 aa, Homo sapiens
  misc_feature (1)...(63): Xaa = X or * as defined in Table 2
TVPHHAFILFFFCFFERESYSAAQTGVQWHNLGSLQPLPPGFKXFSCLSLPSCWDCGHGGVSL

SEQ ID NO: 13526 - protein, 99 aa, Homo sapiens
  misc_feature (1)...(99): Xaa = X or * as defined in Table 2
GSFALVAQAGVQWWDLGSQQPPPPGPKQFSCLSLLSSWDYRRALPWLANFVFLVETGLHHVGQAGLXLLTSSDPPALASQSAGITGVLGLASTYFIEVI

SEQ ID NO: 13527 - protein, 151 aa, Homo sapiens
RRDYVFIEFCVEDGKDVNVNFEKSKLTFSCLGGSDNFKHLNEIDLFHCIDPNDSKHKRTDRSILCCLRKGESGQSWPRLTKERAKLNWLSVDFNNWKDWEDDSDEDMSNFDRFSEMMNNMGGDEDVDLPEVDGADDVSLKILFSGYFHTIK

SEQ ID NO: 13528 - protein, 42 aa, Homo sapiens
  misc_feature (1)...(42): Xaa = X or * as defined in Table 2
FLHFKXMMNNMGGDEDVDLPEVDGADDVSLKILFSVYFHTIK

SEQ ID NO: 13529 - protein, 100 aa, Homo sapiens
  DOMAIN (6)..(37): HMG14 and HMG17 proteins domain identified by eMATRIX, accession number BL00355, p-value=2.528e-25, raw score of 5.97
  DOMAIN (1)..(84): HMG14 and HMG17 domain identified by PFam, accession name HMG14_17, E-value=1.1e-15, PFam score of 65.6
HEKVTKQEPTRRSARLSAKPAPPKPEPKPRKTSAKKEPGAKISRGAKGKKEEKQEAGKEGTAPSENGETKAEEIHISRSTVNVSTSRGTPPSTLHRKLNL

SEQ ID NO: 13530 - protein, 40 aa, Homo sapiens
  misc_feature (1)...(40): Xaa = X or * as defined in Table 2
TRPEFPGRTTPSQKGXGKKEEKPETXKERTGPSEKGETKA

SEQ ID NO: 13531 - protein, 128 aa, Homo sapiens
  DOMAIN (49)..(80): HMG14 and HMG17 proteins domain identified by eMATRIX, accession number BL00355, p-value=2.528e-25, raw score of 5.97
  DOMAIN (31)..(128): HMG14 and HMG17 domain identified by PFam, accession name HMG14_17, E-value=2.4e-12, PFam score of 54.5
CSCSAEAASSGGAAVPVRCFTFCFTDIVIMPKGKSPENTEGKDGSKVTKQEPTRRSARLSAKPAPPKPEPKPRKTSAKKEPGAKISRGAKGKKEEKQEAGKEGTAPSEHGETKAEEAQKTESVDNEGE

SEQ ID NO: 13532 - protein, 140 aa, Homo sapiens
  misc_feature (1)...(140): Xaa = X or * as defined in Table 2
AGNSSIQGHGGWTLRHSILSFLSLLPFSRGPQCMGAVQPLVLKQPRDASLRGCLLGYDSTATGLYXILCNLRRHPGVMPSCGARVLRDHNPEDIEWLCSCSLLEVLSGSLSSTPGLTLADQAGHSGGIMPLEGSLRSDCC

SEQ ID NO: 13533 - protein, 123 aa, Homo sapiens
  misc_feature (1)...(123): Xaa = X or * as defined in Table 2
HAGLGAHPLHHPVIQQEGFLPAPRGFGYRSEVDXIRIPAESTGQNSQCQLRKXKDDSYFHCGYFCGCVCTCRGRLQSSTSHQCQAALXLLLPVCLTMLRCISSLIYTXNLKTVHSVRLNFIYN

SEQ ID NO: 13534 - protein, 123 aa, Homo sapiens
  DOMAIN (64)..(123): Acyl CoA binding protein domain identified by PFam, accession name ACBP, E-value=8.9e-05, PFam score of 5.6
  misc_feature (1)...(123): Xaa = X or * as defined in Table 2
RQGPQGGRAAPRPPMPGPPLSSARHALPLGSWESWCCCCLIPADRPWDRGQHWQLEMADTRSVHETMMQASRKEIQSLPKNGSFPSTNEMRLRYYSSYNQASEXPXKLSRPGLWDPIGRAKWD

SEQ ID NO: 13535 - protein, 76 aa, Homo sapiens
  misc_feature (1)...(76): Xaa = X or * as defined in Table 2
SGRPFLFFFQGKERVYFIPVVVLFYTVVVQXLRKNVVRWQKTMEPPRSWLMQLGHTEEGPGYPLLGETETKLFRTA

SEQ ID NO: 13536 - protein, 32 aa, Homo sapiens
  misc_feature (1)...(32): Xaa = X or * as defined in Table 2
RRPFFFFFFASCIXNLISPNVQLSNFTCILRN

SEQ ID NO: 13537 - protein, 63 aa, Homo sapiens
PDFFFIQYRCKVVAQRLWVIAFLRLMTSITSLVQLLQTNADFSLPLAFPLLAIGPIPSISHFP

SEQ ID NO: 13538 - protein, 150 aa, Homo sapiens
  DOMAIN (110)..(134): VITAMIN D RECEPTOR SIGNATURE domain identified by eMATRIX, accession number PR00350F, p-value=6.400e-11, raw score of 8.61
  DOMAIN (2)..(125): Ligand-binding domain of nuclear hormone domain identified by PFam, accession name hormone_rec, E-value=4.4e-07, PFam score of 37.0
NTFMVLQVIKFTKDLPVFRSLPIEDQISLLKGAAVEICHIVLNTTFCLQTQNFLCGPLRYTIEDGARAPYLTDRPGVTQRDEIDQLQEEMALTLQSYIKGQQRRPRDRFLYAKLLGLLAELRSINEAYGYQIQHIQGLSAMMPLLQEICS

SEQ ID NO: 13539 - protein, 367 aa, Homo sapiens
  DOMAIN (25)..(58): Nuclear hormones receptors DNA-binding region proteins domain identified by eMATRIX, accession number BL00031A, p-value=3.348e- 31, raw score of 19.55
  DOMAIN (23)..(98): Zinc finger, C4 type (two domains) domain identified by PFam, accession name zf-C4, E-value=4.9e-44, PFam score of 150.7
EKQESVTATPTRDVMASREDELRNCVVCGDQATGYHFNALTCEGCKGFFRRTVSKSIGPTCPFAGSCEVSKTQRRHCPACRLQKCLDAGMRKDMILSAEALALRRAKQAQRRAQQTPVQLSKEQEELIRTLLGAHTRHMGTMFEQFVQFRPPAHLFIHHQPLPTLAPVLPLVTHFADINTFMVLQVIKFTKDLPVFRSLPIEDQISLLKGAAVEICHIVLNTTFCLQTQNFLCGPLRYTIEDGARVGSQVELLELLFHFHDTLRKLQLQEPEYVLLAAMALFSPAPYLTDRPGVTQRDEIDQLQEEMALTLQSYIKGQQRRPRDRFLYAKLLGLLAELRSINEAYGYQIQHIQGLSAMMPLLQEICS

SEQ ID NO: 13540 - protein, 71 aa, Homo sapiens
  DOMAIN (31)..(55): VITAMIN D RECEPTOR SIGNATURE domain identified by eMATRIX, accession number PR00350F, p-value=9.835e-10, raw score of 8.61
  misc_feature (1)...(71): Xaa = X or * as defined in Table 2
FRGSGPRDKTPNCLISLLFSWQPHYFLQRFLYAKLLGLLAELRSINEAYGYYIQHIQGLSAMMLLLXEICS

SEQ ID NO: 13541 - protein, 230 aa, Homo sapiens
MCPSEMKLPEERSGSNICCSAIFAVLQPLLVIPRQTWSGVDLQQTPTDLQLRVLFVRRKTNKQKGHPHQNPICMSQSSKTKARQASIQIQEIQRMPQRYSSSRATPRHIIVRFTKVRMKEKMLRAAREKGRVTHKGKPIRLTVDLSAETLQARREWGPIFNILKEKNFQPRISYPAKLSFISEGEIKSFTNKQMLRDFVTTRPALQELLKEALNMERNNQYQPLQKHAKL

SEQ ID NO: 13542 - protein, 99 aa, Homo sapiens
  misc_feature (1)...(99): Xaa = X or * as defined in Table 2
GFRGCKPQALAASTWCXLCSCTEVKNXGLGTSTWISEDVRKHLDVQAEVCCKGGALVDNLCQGSTEGKCGVRAPTQSPQWGTAWWSYQKRATILQIPEW

SEQ ID NO: 13543 - protein, 108 aa, Homo sapiens
  misc_feature (1)...(108): Xaa = X or * as defined in Table 2
PMQRSPXRTXWSXKPWQENYVMRAQDSVADSINWKKGXQRLKIKXMKXSKKRSLEKKEXKEMNKASKKYGTMXKDQIYVGLVYLKVTGRMEPSWKTLCRILSRRTSPT

SEQ ID NO: 13544 - protein, 234 aa, Homo sapiens
MAPDDTSGLLEFVGVPLQTLFAWVSPAEAAEQRILLNSKCCCLIGPLEASSQRGTRPCLLLKKFTFHKAIADIDSESCDGAGQSKFKTIWKGFTILDAIKNICDSREEVRILTLTGVGKKFILILMNEFEGFNTSVEGVTAHVVEIARELELQGHSEDVTELLQSHDKTWMNEELLLLDKQPKWFLEMESTLGEDAVNTVEMTTKNSEDYINLVDKAVAGFEKISSSFERSSTV

SEQ ID NO: 13545 - protein, 87 aa, Homo sapiens
  misc_feature (1)...(87): Xaa = X or * as defined in Table 2
SQHFGRTKPEDSLRPGIXDQTGQPRETLFLQNLKKKLAGHGGACLQSQLLGRLRWEDRLISGVXGCSDTXLYHCTPAWVTEQDPVSE

SEQ ID NO: 13546 - protein, 56 aa, Homo sapiens
  misc_feature (1)...(56): Xaa = X or * as defined in Table 2
PRQTGSGVDLRQTPTDLQLRVXLLEGKITNRKGHLHQNPICTSPSSKTKGKDQIYV

SEQ ID NO: 13547 - protein, 514 aa, Homo sapiens
  DOMAIN (464)..(483): RIBOSOMAL PROTEIN S1 SIGNATURE domain identified by eMATRIX, accession number PR00681I, p-value=8.590e-10, raw score of 8.81
  DOMAIN (406)..(483): S1 RNA binding domain identified by PFam, accession name S1, E-value=1e-10, PFam score of 44.6
  misc_feature (1)...(514): Xaa = X or * as defined in Table 2
HCLSNVSAGLHPFTSYCLLHEKKFKAAVLSLGEGGCDGADGADGGDGSGMAKSGPLAAGLLEFAGGPLQTLFAWVSAAEAAEQPILLNSKCCCLIVPLEASSWRGTRPCEVIVSEAGASIYSVSPEANKEMPGLDPNLRSAVSIARRVQDPLAELVKIEPKHIGVGMYQHDVSQTLLKATLDSVVEECVSFVGVDINICSEVLLRHIAGLNANRAKNIIEWREKNGPFINREQLKKVKGLGPKSFQQCCWAFIRNQPGLYPNVLQSANLKLQAKFQGVAVTSSADVEVTNEKQGKKKSKTAVNVLLKPNPLDQTCIHPESYDIAMRFLSSIGGTLYEVGKPEMQQKINSFLEKEGMEKIAERLQTTVHTLQVHHRWVFSQPEGFDFRTDFXXTWIFKEEGIVCLEDLQIGTVLTGKVENATLFGIFVDIGVGKSGLIPIRNVTEAKLSKTKKRRSLGLGPGERVEVQVLNIDIPRSRITLDLIQGVMSIPRRPDADFIFSFPQIDKDKSVVCKL

SEQ ID NO: 13548 - protein, 104 aa, Homo sapiens
  DOMAIN (11)..(24): PROTEIN ZINC-FINGER METAL-BINDI domain identified by eMATRIX, accession number PD00066, p-value=3.400e-14, raw score of 13.92
  DOMAIN (21)..(43): Zinc finger, C2H2 type domain identified by PFam, accession name zf-C2H2, E-value=1.7e-05, PFam score of 31.7
  misc_feature (1)...(104): Xaa = X or * as defined in Table 2
AFRFSSSVRIHERSHTGEKPYECKQCGKAFISSSHFRLHERTHMGEKVXEYKQHSEAFGCSSSFXIHKRVYTGQKLCEYKHCSKALDXSSFFXARKNSHWXETL

SEQ ID NO: 13549 - protein, 110 aa, Homo sapiens
  misc_feature (1)...(110): Xaa = X or * as defined in Table 2
VCSSAKQXQTCFSLVSPTMXNLIKEFLNNIKFPQQDGTSQALVSGENVDYRKIVGVSGVGSYLGSKIFRLGAVAHTCNPSTLGGRGGQITRSGDGDHPGQQGETPSLLKI

SEQ ID NO: 13550 - protein, 127 aa, Homo sapiens
  misc_feature (1)...(127): Xaa = X or * as defined in Table 2
SPSQHSLVPSTPLPGSVLWGIGGCLPCAAEGSRSQQGDGWLRRSSVDLAVGDGEGKEVPRPLALGCDLARDGSRTLSPLGPCPKPLGQRWESXELRKVPGLAPDLSVESAPRSWEAPECQQMLQLSP

SEQ ID NO: 13551 - protein, 68 aa, Homo sapiens
  misc_feature (1)...(68): Xaa = X or * as defined in Table 2
TLGLKXSSHLSLLSSWDYRCMPPHLANXNFCLFVFXRWGLAVLPRLLLNSWPSAILPPWPLKVLELQV

SEQ ID NO: 13552 - protein, 59 aa, Homo sapiens
  misc_feature (1)...(59): Xaa = X or * as defined in Table 2
MTSFSDKFQSFQNRGSTIVTIAHFWSRKYLSDKECSXNACVVFIHSIXKWANTKTFIPD

SEQ ID NO: 13553 - protein, 100 aa, Homo sapiens
  DOMAIN (40)..(80): Protein phosphatase 2C proteins domain identified by eMATRIX, accession number BL01032F, p-value=9.315e-09, raw score of 26.52
  misc_feature (1)...(100): Xaa = X or * as defined in Table 2
VPFENPWVDPRVRPRVRFFSTGTFRCCAHXISXLLQSGSSQASLCRYNEESQKHAALSLSKEHNPTQYEERMRIQKAGGNVRXPRQACVVIMRRVKNMQP

SEQ ID NO: 13554 - protein, 115 aa, Homo sapiens
  misc_feature (1)...(115): Xaa = X or * as defined in Table 2
PARLGLEEGRYLITGRGWVWWLTPVIPAFWEAEVARSQGQKIETILANMVKPHLYXKYKKKLAGGGGGYLXSXLLGRLRQENGVNLGGGACSEPRSCHCTPAWATEQDSVSKNKK

SEQ ID NO: 13555 - protein, 86 aa, Homo sapiens
VQVQGLSILAHLQRVDVLPNPFLLWVGTHLAVLSGDKDDCWVGALATGVEILLDVGTGQWAGNVGKAAGCGVRGIWGGRCQERRGQ

SEQ ID NO: 13556 - protein, 77 aa, Homo sapiens
  DOMAIN (54)..(71): cAMP phosphodiesterases class-II proteins domain identified by eMATRIX, accession number BL00607B, p-value=9.888e-09, raw score of 10.02
FRGAVRAGLGFSCGFGVPDSGIGGAMSSFEGQMAEYPTISIDRFDRENLRARAYFLSHCHKDHMKGLRPPTLKRRLE

SEQ ID NO: 13557 - protein, 24 aa, Homo sapiens
AEIVPLHSSLGDRARLCLKKKKKK

SEQ ID NO: 13558 - protein, 76 aa, Homo sapiens
  misc_feature (1)...(76): Xaa = X or * as defined in Table 2
NTVSTRKYKKLARRSGGCLXSQLLGRLRQENDVNPGGGACSEPRSRHCTPAWATERDSVSKKKKKKKCFQSSILLK

SEQ ID NO: 13559 - protein, 26 aa, Homo sapiens
YEIIKFHKSEYLKLIKVIRKCKQIGL

SEQ ID NO: 13560 - protein, 37 aa, Homo sapiens
LSICRTSFMSNPGPSMLLSPEHENDRREEAGCGGSRL

SEQ ID NO: 13561 - protein, 72 aa, Homo sapiens
  misc_feature (1)...(72): Xaa = X or * as defined in Table 2
ASVTACRLNCQGCSPCQPFCFPHLAAPLPXVPNPQLETPFPXARTQRIPLPSGXPGTPSPKPTNHIPLTDPL

SEQ ID NO: 13562 - protein, 75 aa, Homo sapiens
  misc_feature (1)...(75): Xaa = X or * as defined in Table 2
FFETESRSLTQAGMQWPNLGSLQPPRPGFKQFSCLSLPSRWDHRHMPSGLANFCIFSRDGVSPYXSGWSXTPDLR

SEQ ID NO: 13563 - protein, 72 aa, Homo sapiens
  misc_feature (1)...(72): Xaa = X or * as defined in Table 2
TWRLAVAQAGVQWRNLSSLQPLPPGFKXSSCLSLPSSWEYRLLPPRPANFYIFSRDRVSPCWPGWSQTPDLR

SEQ ID NO: 13564 - protein, 45 aa, Homo sapiens
  misc_feature (1)...(45): Xaa = X or * as defined in Table 2
GSHTVTQAGMQXSNHGSLQLYLPSLRRFSYLNLPSSWDQRSNKEG

SEQ ID NO: 13565 - protein, 84 aa, Homo sapiens
  misc_feature (1)...(84): Xaa = X or * as defined in Table 2
KMGPLSSSSLPEAECPDPRAATLGMNKMLHSHWVSSIAPVDPGMGXKAASGPDFETGQAEARLSPPPSLQESSVWPGDFPHQIC

SEQ ID NO: 13566 - protein, 88 aa, Homo sapiens
  DOMAIN (43)..(58): WILM'S TUMOUR PROTEIN SIGNATURE domain identified by eMATRIX, accession number PR00049D, p-value=3.593e-09, raw score of 0.00
  misc_feature (1)...(88): Xaa = X or * as defined in Table 2
GRVAVRKEKGSFWLVVFNWLSDLNWPLPPLPGELAXTFLKSSLRRPAPAPRPPPPQTPSPTPRSLAVSSEGWRLLLSMTLESDLDPDL

SEQ ID NO: 13567 - protein, 228 aa, Homo sapiens
  DOMAIN (50)..(67): cAMP phosphodiesterases class-II proteins domain identified by eMATRIX, accession number BL00607B, p-value=7.075e-09, raw score of 10.02
  DOMAIN (13)..(194): Metallo-beta-lactamase superfamily domain identified by PFam, accession name lactamase_B, E-value=0.0042, PFam score of -1.1
  misc_feature (1)...(228): Xaa = X or * as defined in Table 2
ARAGLGFSCGFGVPDSGIGGAMSSFEGQMAEYPTISIDRFDRENLRARAYFLSHCHKDHMKGLRAPTLKRRLECSLKVYLYXSPVTKEVLLTSPKYRFWKKRIISIEIETPTQISLVDEASGEKEEIVVTLLPAGHCPGSVMFLFQGNNGTVLYTGDFRLAQGEAARMELLHSGGRVKDIQSVYLDTTFCDPRFYQIPSREECLSGVLELVPKLDHSEPVPCCVAELQ

SEQ ID NO: 13568 - protein, 72 aa, Homo sapiens
  DOMAIN (32)..(47): G-PROTEIN BETA WD-40 REPEAT SIGNATURE domain identified by eMATRIX, accession number PR00320A, p-value=4.960e-12, raw score of 16.74
  DOMAIN (8)..(47): WD domain, G-beta repeat domain identified by PFam, accession name WD40, E-value=0.039, PFam score of 20.5
  misc_feature (1)...(72): Xaa = X or * as defined in Table 2
IYTHIHXIDPMFSLXGHMEGEVWGLATHPYLPICATVSDDKTLRIWDLSPSHCMLAVRKLKKGKRLSHLNVD

SEQ ID NO: 13569 - protein, 1916 aa, Homo sapiens
  DOMAIN (907)..(922): G-PROTEIN BETA WD-40 REPEAT SIGNATURE domain identified by eMATRIX, accession number PR00320A, p-value=4.960e-12, raw score of 16.74
  DOMAIN (153)..(1876): WD domain, G-beta repeat domain identified by PFam, accession name WD40, E-value=5.1e-38, PFam score of 139.7
  misc_feature (1)...(1916): Xaa = X or * as defined in Table 2
MPLKLQNCLALHPERVLVATGQVGKEPYICIWDSYTVQTISVLKDVHTHGIACLAFDLDGQCSVKAVIDNARRNECGYIPVKLYLQKHSFSLICLPFYSFLDFLDINQRLVSVGLDSKNAVCVWDWKRGKMLSMAPGHTDRFWSLCGNALTPKRGVFGKTGDLQTILCLACARDELTYSGALNGDIYVWKGINLIRTIQGAHAAGIFSMNACEEGFATGGRDGCIRLWDLTFKPITVIDLRETDQGYKGLSVRSVCWRGDHILVGTQDSEIFEIVVQERNKPFLIMQGHCEGELWALAVHPTKPLAVTGSDDRSVRIWSLVDHALIARCNMEEPIRCAAVNADGIHLALGMKDGSFTVLRVRDMTEVVHIKDRKEAIHELKYSPDGTYLAVGCNDSSVDIYGVAQRYKKVGECLGSLSFITHLDWSSDSRYLQTNDGNGKRLFYRMPGGKEVTSTEEIKGVHWASWTCVSGLEVNGIWPKYSDINDINSVDGNYIGQVLVTADDYGIIKLFRYPCLRKESLADSHSDESDSDLSDVPELDSEIEQETQLTYRRQCSAGCTSRAPASAQLLVKPQEAFTHGRRQRGSSYRGYDCRSNLFYTQIGEIVYHVAAVGVIYNRQQNTQRFYLGHDDDILCLTIHPLKDYVATGQVGRDPSIHIWDTETIKPLSILKGHHQYGVSAVDFSADGKRLAQLAXMIAILLCSGTGRKERNFQXQEEVKIRFLLXRXTPMCLINXLQLELNTXNFGVKQGEDXLEEKATXAHWGKMTQXCVQCMDGLKRWHFSGTSTGDVCIWRDIFLVKTVKAHDGPVFSMHALEKGFVTGGKDGIVALWDDSFERCLKTYAIKRAALAPGSKGLLLEDNPSIRAISLGHGHILVGTKNGEILEVDKSGPITLLVQGHMEGEVWGLATHPYLPICATVSDDKTLRIWDLSPSHCMLAVRKLKKVQKGNVGLEPPYRVPTGAPPSGVMRRGQPSFRPQNGRTTDSLHHVPGKATGTECQPVKAARKGAILCKTTGAELPKTMGTHLLHQCGLDLRFAGGPLQTFFAWVPPTPRGITSGGCKTVKRVTELIPVETPLYKVSSNPCWGGLTQSGGTGSRTHLMKHSDYPLAEGVHYTGGNPTCPDCPDSSELGAQSSEAADSQSDDSRPFPQELGSLRQSVAKWPLRICAALCLGLKELVAWAHGGDLLIHQLHRSMEKVWFPGQDSTITHCLSWLGVGAPLVLCSSQKAATLVLRESEQVKGDSDLFGNGVAATRTFSELVAKKLARGCSPQWNSESSHLVKEKLARGSRPELNGGRCCCFSPDGKALAVGLNDGSFLMANADTLEDLVSFHHRKDMISDIRFSPGIWPVIGEVTDVTASCLTSDKMVLATGDDLGFVKLFRYPTKGKFGKFKRYVAHSTHVTNVRWTYDDSMLVTLGGTDMSLMVWTNEMEGYREKRPCDSEESDIDSEEDGGYDSDVTRENEISYTIRALSTNIRPMLGIKPHLQQKEPSIDERPPVSRAPPQPEKLQTNNVGKKKRPIEDLVLELIFGYRGRDCRNNVHYLNDGDDIIYHTASVGILHNVATGSQSFYQEHNDDILCLTVNQHPKFINIVATGQVATAPSIHIWDAMNKQTLSILRCYHSKGVCSVSFSATGKLLLSVGLDPEHTITIWRWQEGAKIASRAGHNQRIFVAEFRPDSDTQFVSVGVKHVKFWTLAGRALLSKKGLLSTLEDARMQTMLAIAFGANNLTFTGTISGDVCVWKDHILCRIVARAHNGPVFAMYTTLRDGLIVTGGKERPSKEGGAVKLWDQELRRCRAFRLETGQATDCVRSVCRGKGKILVGTRNAEIIEVGEKNAACNILVNGHVDGPIWGLATHPSRDFFLSAAEDGTVRLWDIADKKMLNKVNLGHAARTVCYSPEGDMVAIGMKNGEFIILL

SEQ ID NO: 13570 - protein, 75 aa, Homo sapiens
  DOMAIN (35)..(56): GLUTELIN SIGNATURE domain identified by eMATRIX, accession number PR00211B, p-value=7.000e-09, raw score of 0.86
  misc_feature (1)...(75): Xaa = X or * as defined in Table 2
PPEXLGPNGCQGPPTPLPKFWXILSKKNGGSPPIIGPGPILKPPXPLRWIPPCPLPSPKCLRLPGHKPSAPQPEN

SEQ ID NO: 13571 - protein, 103 aa, Homo sapiens
  misc_feature (1)...(103): Xaa = X or * as defined in Table 2
SRICPHRDTRKEYNSYTIAFLINLLKFAELDCIVYFRLNDNXMXIFRCSTIFYNPALAFLHILRKPPTSFFXGRFLLSEMPCXMLLLIIXIPNYLIQIIKRSI

SEQ ID NO: 13572 - protein, 42 aa, Homo sapiens
  misc_feature (1)...(42): Xaa = X or * as defined in Table 2
PQVTFSIASRYATILLLXFFXPCLVFYSLPNQFYVQGKLANA

SEQ ID NO: 13573 - protein, 34 aa, Homo sapiens
  misc_feature (1)...(34): Xaa = X or * as defined in Table 2
QSFTYCFESFXNLSVFLYCLIYRITNXVYYLYVE

SEQ ID NO: 13574 - protein, 50 aa, Homo sapiens
  misc_feature (1)...(50): Xaa = X or * as defined in Table 2
LFSFHVSGTMAHTCNPSTLTGXGRITXGLEFKTSLGNTVRSHRYRKKKIA

SEQ ID NO: 13575 - protein, 125 aa, Homo sapiens
  misc_feature (1)...(125): Xaa = X or * as defined in Table 2
NCTYVIKVYNLIRHMYTPITAIKIISTRFKIYWYSLIFSXICIHIFETRSLTPIAQAGVWCHDHSSLQPLPPGLRXSSYLSLSSSWDYRHTPPCSANLCVCVCRDRRVSPCYPGWLLNILNVCII

SEQ ID NO: 13576 - protein, 75 aa, Homo sapiens
  misc_feature (1)...(75): Xaa = X or * as defined in Table 2
FFEMESHSVTQAGVQWPDLGSLQPLPPGFKXFFCLSFPSSWDYRHTPPHPAYFCIFSRNGVSPCWPGWPRTPDPR

SEQ ID NO: 13577 - protein, 101 aa, Homo sapiens
  misc_feature (1)...(101): Xaa = X or * as defined in Table 2
KDEKGEEDGKEDKNGNEKGEDAKENDDGKEKGDKKEGKDVKVKEDEKEREDGKEDEGGNEEEAGKEKEDLKEEEEGKEEDEIKEDDGKKEEPQSIVXNCPM

SEQ ID NO: 13578 - protein, 71 aa, Homo sapiens
  misc_feature (1)...(71): Xaa = X or * as defined in Table 2
GLLVGVGAAAVMPGIVELPTLEELKVDEVNISSAALKDACHDYGDEWDKPNVDIMLXXLEQLHPSMGQGAL

SEQ ID NO: 13579 - protein, 79 aa, Homo sapiens
  DOMAIN (9)..(66): Zinc finger, C2H2 type domain identified by PFam, accession name zf-C2H2, E-value=0.0026, PFam score of 24.4
  misc_feature (1)...(79): Xaa = X or * as defined in Table 2
MDGGTEKPFACPVLXCTKRYKNVNGIKYHAKNGHRTQIRVRKPFKCRCGKSYKTAQGLRHHTINFHPPVSAEIIRKMQQ

SEQ ID NO: 13580 - protein, 156 aa, Homo sapiens
  DOMAIN (19)..(42): LACY PROTON/SUGAR SYMPORTER SIGNATURE domain identified by eMATRIX, accession number PR00174A, p-value=3.132e-09, raw score of 8.67
  misc_feature (1)...(156): Xaa = X or * as defined in Table 2
RRMHAYVSLDPLERPPFFFFFLFFFFFFFFLRRSFALVAQAGVHWRDLGSPQPPPPRFKXFSCLSLPSSWNYRHAPPRPANFVFLVETGLQLPTSGDLPASASQSVGITGVSHCAWPGNWLLKETRCGSSVGRQITGPITPDAWVDPGIPDRYLQA

SEQ ID NO: 13581 - protein, 149 aa, Homo sapiens
  misc_feature (1)...(149): Xaa = X or * as defined in Table 2
KWPYWLKEESSKLLHHQETSXHSNLGNXASGLRTLPYRAEQGKEXGMQTSGRXTRXKEALFSITTDQRRPAVGSSSLPAGHLCSSQQRRAFTDLRGEDVLADWSMGGYGWPRRGPRIPTLVGRGAHSMATTTTDPHRVLPAYHQCSPCI

SEQ ID NO: 13582 - protein, 114 aa, Homo sapiens
  DOMAIN (38)..(56): Immunoglobulins and major histocompatibility complex proteins domain identified by eMATRIX, accession number BL00290B, p-value= 7.750e-19, raw score of 13.17
  misc_feature (1)...(114): Xaa = X or * as defined in Table 2
DAWEQTQDTELVETRPAGDGTFQKWAAVVVPSGEEQRYTCHVQHEGLPQPLILRWEQSPQPTIPIVGIVAGLVVLGAVVTGAVVAAVMWRKKSSDRNRGSYSQAAVXDSFLVWD

SEQ ID NO: 13583 - protein, 56 aa, Homo sapiens
  DOMAIN (11)..(29): Immunoglobulins and major histocompatibility complex proteins domain identified by eMATRIX, accession number BL00290B, p-value= 4.000e-21, raw score of 13.17
VVVPSGEEQRYTCHVQHEGLPKPLTLRWDRKGGSYSQAASSDSAQGSDVSLTACKV

SEQ ID NO: 13584 - protein, 236 aa, Homo sapiens
  DOMAIN (31)..(54): Immunoglobulins and major histocompatibility complex proteins domain identified by eMATRIX, accession number BL00290A, p-value= 4.600e-16, raw score of 20.89
  DOMAIN (22)..(200): Class I Histocompatibility antigen, domains domain identified by PFam, accession name MHC_I, E-value=4.6e-139, PFam score of 475.4
MAPRTLVLLLSGALALTQTWAGSQSMRYFSTSVSRPGRGEPRFIAVGYVDDTQFVRFDSDAASQRMEPRAPWIEQEGPEYWDGETRKVKAHSQTDRENLRIALRYYNQSEAGSHTLQMMFGCDVGSDGRFLRGYHQYAYDGKDYIALKEDLRSWTAADMAAQITKRKWEAAHVAEQQRAYLEGTCVDGLRRYLENGKETLQRTDPPKTHMTHHPISDHEATLRCWALGFYPCGDHT

SEQ ID NO: 13585 - protein, 73 aa, Homo sapiens
  DOMAIN (23)..(36): PROTEIN ZINC-FINGER METAL-BINDI domain identified by eMATRIX, accession number PD00066, p-value=8.826e-11, raw score of 13.92
  DOMAIN (5)..(60): Zinc finger, C2H2 type domain identified by PFam, accession name zf-C2H2, E-value=1.6e-12, PFam score of 55.0
GEKPHKCGDCGKAFNSPSHLIRHQRIHTGQKSYKCHQCGKVFSLRSLLAEHQKIPFGDNCFKCNEYSKPSSIN

SEQ ID NO: 13586 - protein, 59 aa, Homo sapiens
  DOMAIN (7)..(20): PROTEIN ZINC-FINGER METAL-BINDI domain identified by eMATRIX, accession number PD00066, p-value=8.500e-09, raw score of 13.92
  DOMAIN (17)..(39): Zinc finger, C2H2 type domain identified by PFam, accession name zf-C2H2, E-value=3.1e-05, PFam score of 30.8
  misc_feature (1)...(59): Xaa = X or * as defined in Table 2
RSQVIRHQRIPTGQKSYKCHKCGQGFSLRSLLAEHQKIHFXDNXCTGNEYSKPSSINCH

SEQ ID NO: 13587 - protein, 84 aa, Homo sapiens
  DOMAIN (34)..(47): PROTEIN ZINC-FINGER METAL-BINDI domain identified by eMATRIX, accession number PD00066, p-value=8.826e-11, raw score of 13.92
  misc_feature (1)...(84): Xaa = X or * as defined in Table 2
LHLMQNRRLHTGDKLHKYDDCGKAFTSHSHLIRHQRIHTGQKSYKCHQCGKVFSLRSLLAEYQKIYFXDNSSECNEYSKPSSIN

SEQ ID NO: 13588 - protein, 80 aa, Homo sapiens
DTSKGIADVPEWFKGSRLNYAENLLRHKENDRVALYIAREGKEEIVKVTFEELRQEVALFAAAMRKMGMYNSVQRMNLYL

SEQ ID NO: 13589 - protein, 126 aa, Homo sapiens
  misc_feature (1)...(126): Xaa = X or * as defined in Table 2
KHSVCGRARASCSSFASVLFLISKMVREQYTTATEGICIERPENQYVYKIGIYGWRKRCLYLVGLLLLMILVVNITLTIWILNVTWVSSTSTAPHRVXHXNSLCAETQLQLRLPKRGRHVNFEVPY

SEQ ID NO: 13590 - protein, 246 aa, Homo sapiens
  misc_feature (1)...(246): Xaa = X or * as defined in Table 2
ILSLPLPLLAGGTDIISCFMGHNFSLPVYKGEIQARNLGMAVEAWNEEXKAGWGESGELACTKPIPCQPTHFWNDENGNKYRKAYFSKFPSIWAHGDYXRINPKTGGIVMLGRSDGTLNPNGVRFGSSEIYNIVESFQEVEDSLCVPQYNKYREERVILFLKMASGHAFQPDLVKRIRDAIRMGLSARHVPSLILETKGIPYTLNGKKVEVAVKQIIAGKAVEQGGAFSNPETLDLYRDIPELQGF

SEQ ID NO: 13591 - protein, 279 aa, Homo sapiens; identical to SEQ ID NO: 12255
  DOMAIN (84)..(130): Hexokinases proteins domain identified by eMATRIX, accession number BL00378E, p-value=7.818e-19, raw score of 22.92
  DOMAIN (102)..(273): Hexokinase domain identified by PFam, accession name hexokinase, E-value=2e-105, PFam score of 363.7
  misc_feature (1)...(279): Xaa = X or * as defined in Table 2

SEQ ID NO: 13592 - protein, 119 aa, Homo sapiens
  misc_feature (1)...(119): Xaa = X or * as defined in Table 2
FFLRRSFTLVAQAGVQWRDLGSLQPPPLRFRXFSCLSLPSSWDYRCLPPLLANFLHFQQRRSFTILARLLVSNSXPRDLPASASQSAGITGMSHHACPVIXFFFETEFHSCCPGWSAVA

SEQ ID NO: 13593 - protein, 68 aa, Homo sapiens
  misc_feature (1)...(68): Xaa = X or * as defined in Table 2
VVKKLLGILLNQMKTKMNFGDFLTVMTQKMSEKDTKEEILKSSQFHHHQRAXKLFDDDETGKISGFLL

SEQ ID NO: 13594 - protein, 74 aa, Homo sapiens
  misc_feature (1)...(74): Xaa = X or * as defined in Table 2
FLRXSLAVNQAGVQGRHLRSLQPLPPRFKLFSLLYLPSSWDYSHAPLFPANFCIFSRNDVSPCWPGRSQTPDLK

SEQ ID NO: 13595 - protein, 216 aa, Homo sapiens
MVDVGKWPIFTLLSPQEIASIRKACVFGTSASEALYVTDNDEVFVFGLNYSNCLGTGDNQSTLVPKKLEGLCGKKIKSLSYGSGPHVLLSTEGKEYGKADARWVYFDPTIVSVEILTVALDGSLALFLIYAIVKEKYYRQVRSWKCESLALLYQVSNSLGIKRQSWREQQVCGLSSPSGGLTGSAALGGGPFCGHPVVTPKSLAKHLYPVTRQFDS

SEQ ID NO: 13596 - protein, 195 aa, Homo sapiens
  misc_feature (1)...(195): Xaa = X or * as defined in Table 2
VGAGGRGWRFAAAVRRAAGGGLRPGPAPGPRAGGGGPRGAHLALLRRAGALRAGKEYGKADARWVYFDPTIVSVEILAVALDVSLALFLIYAIVKEKYYRHFLQITLCVCELYGCWMTFLPEWAHPEAPNLQQPATGWLYWLGFTLFFFXRCVGFLIPRNWLLWAVHGPRTSRKWHQKGNQFQWKEVFSGTFQNP

SEQ ID NO: 13597 - protein, 177 aa, Homo sapiens
  misc_feature (1)...(177): Xaa = X or * as defined in Table 2
TPWLRDFHDPIVEVEVSVFPGEPLLFSAPGLPEPRAGHSVPSGLSVVAFPSFSSDNVPGSLEHLLVLHFPGGDVSLLRPLCLPIXETFMIPLSRLRCPCSRVSPSFSQHQACLSLGLVILSPVASVWLLFHRFLLTMSQVPWSIFLFSISPGATCPSCALCAFLSRSEELRSHLCHR

SEQ ID NO: 13598 - protein, 321 aa, Homo sapiens
  DOMAIN (94)..(128): IMMUNOGLOBULIN V REGION domain identified by eMATRIX, accession number DM00031B, p-value=9.149e-10, raw score of 15.41
  DOMAIN (51)..(127): Immunoglobulin domain identified by PFam, accession name ig, E-value=3.1e-08, PFam score of 31.6
LSPRVQVGPGAAASAACAGEGTMWLPWALLLLWVPGCFALSKCRTVAGPVGGSLSVQCPYEKEHRTLNKYWCRPPQIFLCDKIVETKGSAGKRNGRVSIRDSPANLSFTVTLENLTEEDAGTYWCGVDTPWLRDFHDPVVEVEVSVFPASTSMTPASITAAKTSTITTAFPPVSSTTLFAVGATHSASIQEETEEVVNSQLPLLLSLLALLLLLLVGASLLAWRMFQKWIKAGDHSELSQNPKQAATQSELHYANLELLMWPLQEKPAPPREVEVEYSTVASPREELHYASVVFDSNTNRIAAQRPREEEPDSDYSVIRKT

SEQ ID NO: 13599 - protein, 40 aa, Homo sapiens
  misc_feature (1)...(40): Xaa = X or * as defined in Table 2
PRVRCFIYTGKAPNLDKMADDLLAAADKVRXEGSKPRQNG

SEQ ID NO: 13600 - protein, 112 aa, Homo sapiens
  misc_feature (1)...(112): Xaa = X or * as defined in Table 2
LCQSQATLLSIFSQEYQKHIKRTHAKHHTSEAIESYYQRYLNGVVKNGAAPVLLDLANEVDYAPSLMARLILERFLQEHEETSPFKGIINMMLRYPSQIPDGALAYXVYHGK

SEQ ID NO: 13601 - protein, 377 aa, Homo sapiens
  DOMAIN (216)..(229): BTB (also known as BR-C/Ttk) domain proteins domain identified by eMATRIX, accession number PF00651, p-value=9.053e-11, raw score of 15.00
  DOMAIN (188)..(303): BTB/POZ domain identified by PFam, accession name BTB, E- value=6.1e-27, PFam score of 102.9
MSSGPVAESWCYTQVVHFLFNCFLFFYQQIKVVKFSYMWTINNFSFCREEMGEVIKSSTFSSGANDKLKWCLRVNPKGLDEESKDYLSLYLLLVSCPKSEVRAKFKFSILNAKGEETKAMESQRAYRFVQGKDWGFKKFIRRDFLLDEANGLLPDDKLTLFCEVSVVQDSVNISGQNTMNMVKVPECRLADELGGLSENSRFTDCCLCVAGQEFQAHKAILAARSPVFSAMFEHEMEESKKNRVEINDVEPEVFKEMMCFIYTGKAPNLDKMANDLLAAADKYALERLKVMCEDALCSNLSVENAAEILILADLHSADQLKTQAVDFINYHASDVLETSGWKSMVVSHPHLVDEAYRSLASAQCPFLGPPRKRLKQS

SEQ ID NO: 13602 - protein, 112 aa, Homo sapiens
  DOMAIN (38)..(65): Protamine P1 proteins domain identified by eMATRIX, accession number BL00048, p-value=4.263e-09, raw score of 6.39
  misc_feature (1)...(112): Xaa = X or * as defined in Table 2
GCRHSASCAAPRALGPARAPQRXPKAGRVFPERTSXTXGXPAPGRRHPGPRIGGRRRRSGCSRVRRSSVRDCPSSRSKASNPPLSLSSSTGCDGARPPCSVXRWSRFPGARR

SEQ ID NO: 13603 - protein, 485 aa, Homo sapiens
  misc_feature (1)...(485): Xaa = X or * as defined in Table 2
SLPRNLPVTIISQDFGDASPRTNGQEADDSSTSEESPEDSKYFLPYHPPQRRMNLKGIQLQRAKSPISLKRTSDFQAKGHEEEGTDASPSSCGSLPITNSFTKMPPRSRSSIMSITAEPPGNDSIVRRYKEDAPHRSTVEEDNDSGGFDALDLDELAAGETVAQSPPGVPCQPPLFQGSPSLCQLRLPTDETKDEWSSLMGKHQRYQVLKRDDSHERYSFGPSSIHSSSSSHQSEGLDAYDLEQVNLMFRKFSLERCRNRGPQRKGLAKAMQHGRGKEVGPRYPAVPIHDTVEPDPSGLRSPLWGTCGAQGPRCSTRRXMATASPPSSPCWGATREGASCTRSSLALWPRKPASVRATSCCCXKAASEARGRVSRWTHAPKRKPTGPSRGAAAPSRCTKGQPRSPAENPWACRIXCGQHLQSPELRSSTALQVWNSRERKFIPAGVPEAGEGHGGRPDHIGGLVLHPAEPEHLQPAGRLHHVPEV

SEQ ID NO: 13604 - protein, 41 aa, Homo sapiens
  misc_feature (1)...(41): Xaa = X or * as defined in Table 2
CCFEILKLMKILISEMHLMLFFLXQLRKSAXIPYVPELFLS

SEQ ID NO: 13605 - protein, 64 aa, Homo sapiens
SGVMVSFNRVLLIILEWNPFLTYSPRRLGLEIFFLFYFNVFFFRKTPLLLCTIKYFISLNCIDF

SEQ ID NO: 13606 - protein, 35 aa, Homo sapiens
  misc_feature (1)...(35): Xaa = X or * as defined in Table 2
AWKFFFYFILLFFFLEKHHFYYVQXNISLAXKKKK

SEQ ID NO: 13607 - protein, 51 aa, Homo sapiens
  misc_feature (1)...(51): Xaa = X or * as defined in Table 2
THDHVSVYFFFLGLKSTEIQCDIKMQIFLFIXVENHLPVSIYILKYFLWIL

SEQ ID NO: 13608 - protein, 38 aa, Homo sapiens
  DOMAIN (3)..(23): F-ACTIN CAPPING PROTEIN ALPHA SUBUNIT SIGNATURE domain identified by eMATRIX, accession number PR00191C, p-value=4.183e- 11, raw score of 11.49
  misc_feature (1)...(38): Xaa = X or * as defined in Table 2
TMSDTTFKALRXQLPVTRTKIDWNKILSYKIGKEMQNA

SEQ ID NO: 13609 - protein, 77 aa, Homo sapiens
  DOMAIN (28)..(52): TRANSMEMBRANE FOUR FAMILY SIGNATURE domain identified by eMATRIX, accession number PR00259A, p-value=3.068e-09, raw score of 9.27
  misc_feature (1)...(77): Xaa = X or * as defined in Table 2
SDSVNPQLRVFKILNXSLGILKTHIQIKLFFFFFSALTFALGTLLVCVSIYLYGLPRQDTTSIQQGETASKERVIGV

SEQ ID NO: 13610 - protein, 33 aa, Homo sapiens
  misc_feature (1)...(33): Xaa = X or * as defined in Table 2
KTLVPLILPIITTLANPCKKDXYPYYVKISIAC

SEQ ID NO: 13611 - protein, 25 aa, Homo sapiens
ESYYKTEGDEEAEEEQEENLEASGK

SEQ ID NO: 13612 - protein, 99 aa, Homo sapiens
  misc_feature (1)...(99): Xaa = X or * as defined in Table 2
SRFKRFFCLSLPSSWDYRHAPTHALANFVFLIETGFLHVGQAGLKLLTXGDLPALASQSAGITGGNHCTRQVQCFFRCWGYTRESGQKLDPARVMFENK

SEQ ID NO: 13613 - protein, 131 aa, Homo sapiens
  misc_feature (1)...(131): Xaa = X or * as defined in Table 2
TGTHFHFYLLLVLLFLEMGPQSITQADVQGHNHSSLQPQTPGLKQSSRLSLXNSWDYRHTPPHPANFFRILXRQGSHYVAQGXSQTPGLKQFSRLGFPKRWGYRHESPHMARDRYSYCPHFPDEETGDPER

SEQ ID NO: 13614 - protein, 52 aa, Homo sapiens
  DOMAIN (12)..(50): Ribosomal protein S14p/S29e domain identified by PFam, accession name Ribosomal_S14, E-value=0.025, PFam score of 11.6
  misc_feature (1)...(52): Xaa = X or * as defined in Table 2
QLXWSHLLKMLQRYSSCNVXXKRRGLIRTYGLDMCSQSLCQYAKDIGFIKLD

SEQ ID NO: 13615 - protein, 413 aa, Homo sapiens
MRRRKRAPAGILFLRPRRRGWPRGSGYRALPLGDFDRFQQSSFGFLGSQKGCLSPERGGVGTGADVPQSWPSCLCHGLISFLGFLLLLVTFPISGWFALKPEEAERVKAQVQALGLAEAQPMAVVQSVPGAHPVPVYAFSIKGPSYGEDVSNTTTAQKRKCSQTQCPRKVIKMESEEGKEARLARSSPEQPRPSTSKAVSPPHLDGPPSPRSPVIGSEVFLPNSNHVASGAGEAEERVVVISSSEDSDAENSPAEQAATPDAEPHSEPPDHQERPAVHRGIRYLLYRAQRAIRLRHALRLHPQLHRAPIRTWSPHVVQASTPAITGPLNHPANAQEHPAQLQRGISPPHRIRGAVRSRSRSLRGSSHLSQWLNNFFALPFSSMASQLDMSSVGGPHAPQLIPDTHLPTLIEGR

SEQ ID NO: 13616 - protein, 1042 aa, Homo sapiens
  DOMAIN (57)..(96): BIR repeat proteins domain identified by eMATRIX, accession number BL01282B, p-value=2.286e-09, raw score of 30.49
  DOMAIN (128)..(240): B-box zinc finger domain identified by PFam, accession name zf-B_box, E-value=2e-42, PFam score of 154.4
  misc_feature (1)...(1042): Xaa = X or * as defined in Table 2
KLGSMEPAPARSPRPQQDPARPQEPTMPPPETPSEGRQPSPSPSPTERAPASEEEFQFLRCQQCQAEAKCPKLLPCLHTLCSGCLEASGMQCPICQAPWPLGADTPALDNVFFESLQRRLSVYRQIVDAQAVCTRCKESADFWCFECEQLLCAKCFEAHQWFLKHEARPLAELRNQSVREFLDGTRKTNNIFCSNPNHRTPTLTSIYCRGCSKPLCCSCALLDSSHSELKCDISAEIQQRQEELDAMTQALQEQDSAFGAVHAQMHAAVGQLGRARAETEELIRERVRQVVAHVRAQERELLEAVDARYQRDYEEMASRLGRLDAVLQRIRTGSALVQRMKCYASDQEVLDMHGFLRQALCRLRQEEPQSLQAAVRTDGFDEFKVRLQDLSSCITQGKDAAVSKKASPEAASTPRDPIDVDLAEEAERVKAQVQALGLAEAQPMAVVQSVPGAHPVPVYAFSIKGPSYGEDVSNTTTAQKRKCSQTQCPRKVIKMESEEGKEARLARSSPEQPRPSTSKAVSPPHLDGPPSPRSPVIGSEVFLPNSNHVASGAGEAEERVVVISSSEDSDAENSCEWPRSSAQDSCLPPFQVPGGTATAGDSQTCLAPGEFSSEALSPKLCXGQSPNDSCMPGPPQPSHYTRARSSSEMLIACVQSTVSFLECPRPLSGASLCIFCPLSPQXGGLDKNPFLGLLQPVGASEGVSGHRAAIXGPNKXGLTPSMXKDIXIHSTVKQVASWVVTLLSLEVYYXRLDYHLSRGKGDLNRVKGWTGWPLRSLPALSLRFCIGKCMEPMETAEPQSSPAHSSPAHSSPVQSLLRAQGASSLPCGTYHPPAWPPHQPAEQAATPDAEPHSEPPDHQERPAVHRGIRYLLYRAQRAIRLRHALRLHPQLHRAPIRTWSPHVVQASTPAITGPLNHPANAQEHPAQLQRGISPPHRIRGAVRSRSRSLRGSSHLSQWLNNFFALPFSSMASQLDMSSVVGAGEGRAQTLGAVVPPGDSVRGSMEASQVQVPLEASPITFPPPCAPERPPISPVPGARQAGL

SEQ ID NO: 13617 - protein, 138 aa, Homo sapiens
  DOMAIN (68)..(122): Tubulin subunits alpha beta, and gamma proteins. domain identified by eMATRIX, accession number BL00227F, p-value=1.000e- 40, raw score of 21.16
  DOMAIN (1)..(120): Tubulin/FtsZ family domain identified by PFam, accession name tubulin, E-value=6.7e-57, PFam score of 202.5
  misc_feature (1)...(138): Xaa = X or * as defined in Table 2
ACCLLYRGDMVPKDVNAAIVTIKTKRRIQFVDXCPTGFMDGINYQPSTVVPVENLDKVQRAVCMLSNTTAIAEAWARLDHKFDLMYAKRAFVHWYMGEAMEEGEFSDAREDMAALDKDYEEVDADSVQRXGDEDGQEY

SEQ ID NO: 13618 - protein, 105 aa, Homo sapiens
  DOMAIN (46)..(100): Tubulin subunits alpha beta, and gamma proteins. domain identified by eMATRIX, accession number BL00227F, p-value=1.000e- 40, raw score of 21.16
  DOMAIN (3)..(97): Tubulin/FtsZ family domain identified by PFam, accession name tubulin, E-value=1.1e-49, PFam score of 178.5
TNRSIQFGDWCPTGFKVGINYQPPTAVPAGDLANVQRAVCMLSNTTAIAEAWARLDHKFDLMYAKRAFVHWYVGEGMEEGDFSKAREDMAALEKDYEEVCVDSVE

SEQ ID NO: 13619 - protein, 204 aa, Homo sapiens
  DOMAIN (137)..(191): Tubulin subunits alpha beta, and gamma proteins. domain identified by eMATRIX, accession number BL00227F, p-value=1.000e- 40, raw score of 21.16
  DOMAIN (1)..(188): Tubulin/FtsZ family domain identified by PFam, accession name tubulin, E-value=9.2e-116, PFam score of 398.0
GALNVDLTEFQTNLVPYPRIHFPLATYAPVISAEKAYHEQLSVAEITNACFEPANQMVKCDPRHGKYMACCLLYRGDVVPKDVNAAIAAIKTKRSIQFVDWCPTGFKVGINYQPPTVVPGGDLAKVQRAVCMLSNTTAIAEAWARLDHKFDLMYAKRAFVHWYVGEGMEEGEFSEAREDMAALKKDYEEVGADSADGEDEGEEY

SEQ ID NO: 13620 - protein, 481 aa, Homo sapiens
  DOMAIN (73)..(128): Tubulin subunits alpha beta, and gamma proteins. domain identified by eMATRIX, accession number BL00227B, p-value=1.000e- 40, raw score of 19.29
  DOMAIN (22)..(472): Tubulin/FtsZ family domain identified by PFam, accession name tubulin, E-value=1.9e-242, PFam score of 818.8
  misc_feature (1)...(481): Xaa = X or * as defined in Table 2
RGKTLRGLWRFGKIPTHSRENMRECISIHVGQAGVQIGNACWELYCLEHGIQPDGQMPSDKTIGGGDDSFNTFFSETGAGKHVPRAVFVDLEPTVIDEVRTGTYRQLFHPEQLITGKEDAANNYARGHYTIGKEIIDLVLDRIRKLADQCTRLQGFLVFHSFGGGTGSGFTSLLMERLSVDYGKKSKLEFSIYPAPQVSTAVVEPYNSILTTHTTLEHSDCAFMVDNEAIYDICRRNLDIERPTYTNLNRLIGQIVSSITASLRFDGALNVDLTEFQTNLVPYPRIHFPLATYAPVISAEKAYHDQLSVAEITNACFEPANQMVKCDPRHGKKMACCLLYRGDVVPKECHMLAILPPSKTKRTYPCFVDWVRPSGFHRCGISTIQPPTLLVPGGDTGARYQRSCVHCXANTTAIAEAWARLDHKFDLMYAKRAFVHWYVGEGMEEGEFSEAREDMAALEKDYEEVGVDSVEGEGEEEGEEY

SEQ ID NO: 13621 - protein, 168 aa, Homo sapiens
  misc_feature (1)...(168): Xaa = X or * as defined in Table 2
CLKEISFLNGSLTPGAAVKSWLTATSACSFKGFSCLSLSSSWNYRCAPPRPTNFCIFSKDRVSLFLLLFSLFLPLLARLVLNYXPQVIHLPWTPKVLGLXAAVKSWLTATSACSFKGFSCLSLSSSWNYRCAPPRPTNFCIFSKDRVSLFLLLFSLFLPLLARLVLNY

SEQ ID NO: 13622 - protein, 129 aa, Homo sapiens
AVANMSGWESYYKTEGDEEAEEEQEENLEASGDYKYSGRDSLIFLVDAYKAMFESQSEDELTPFDMSIQCIQSVYISKIISSDRDLLAWVFYGTEKDKNSVNFKNIYVLQELDNPRCKRILKLCQVKGP

SEQ ID NO: 13623 - protein, 76 aa, Homo sapiens
  misc_feature (1)...(76): Xaa = X or * as defined in Table 2
RLFFFFFVFLVEMGFCHVGQAGLKLVTSCDPPTSASQSAGIAGVSHRAXPNTSLKXKLTDSKSPGICFFVCFEIES

SEQ ID NO: 13624 - protein, 58 aa, Homo sapiens
  misc_feature (1)...(58): Xaa = X or * as defined in Table 2
CKFAHGNAELHEWEERRDALGMKLNKARKDHLIGPNDNDFGKYRFLFKDLNXYAGFYV

SEQ ID NO: 13625 - protein, 62 aa, Homo sapiens
GWQPYWGLWVLRAAGRMPAHQALPTYARSFLSVSVGAFVKTWLPFILLLGIILTVSLVFNLR

SEQ ID NO: 13626 - protein, 83 aa, Homo sapiens
  misc_feature (1)...(83): Xaa = X or * as defined in Table 2
LRPWKPLCSSVERLWLPAVELLPPPPAGVLPQPSAQYGERRTFGLTCQGGPGTRAGPSMGCTGYTXRVSISQVASGPFHHWPL

SEQ ID NO: 13627 - protein, 137 aa, Homo sapiens
  misc_feature (1)...(137): Xaa = X or * as defined in Table 2
ERLWLPSVELLPPPPAGVLPQPSAQYGERRTFGLTCQGGPGTRAGPSMGCTGYTXRVSISQVASGPSPLASRMVQRGWLGPFVRLLPAAALGDMCAHLASSSPCSPLLTVPRASQVPPKELDPISPCSLRPRKVSGP

SEQ ID NO: 13628 - protein, 115 aa, Homo sapiens
  DOMAIN (30)..(44): C2H2-TYPE ZINC FINGER SIGNATURE domain identified by eMATRIX, accession number PR00048A, p-value=1.947e-11, raw score of 10.52
  DOMAIN (6)..(58): Zinc finger, C2H2 type domain identified by PFam, accession name zf-C2H2, E-value=0.076, PFam score of 19.6
  misc_feature (1)...(115): Xaa = X or * as defined in Table 2
VSVVEFLCSKRFAQWSHLAQHQLLHTGEKPFPCLECGRCFRQRWSLAVHKCSPKAPNCSPRSAIGGSSQRGNAHXKGKDCLRSFHFMEGPRKGKEEPQVIQGRVRTKPGSPAAQS

SEQ ID NO: 13629 - protein, 116 aa, Homo sapiens
  misc_feature (1)...(116): Xaa = X or * as defined in Table 2
EGAAPSSGGPLRDFWGFPRNTNKPCSGTGXSLQRICWMASLAPPGPAPRGQAPHTHRPLGRPSRGAQVQPAAQAGQATSKQSPGPGFWSQLPQDLTTASVSPSVNGASKACLECKS

SEQ ID NO: 13630 - protein, 119 aa, Homo sapiens
  misc_feature (1)...(119): Xaa = X or * as defined in Table 2
GGEDPPALCRKPTAQTQTGKKHSGTAAVRSRERHKEVRAGHSLSALDSPPSLLPGILSPVHQCDVTRVDPIPSLLTALLWLPSAPKXRSEPHKPGVGDPVWSAPPTSGEDLILLATSAH

SEQ ID NO: 13631 - protein, 318 aa, Homo sapiens
  misc_feature (1)...(318): Xaa = X or * as defined in Table 2
GSWSGLGARPPGGWNYTGSKKLSPGGEALXMKRSKELITKNHSQEETSILRCWKCRKCIASSGCFMEYLENQVIKDKDDSVDAQNICHVWHMNVEALPEWISCLIQKAQWTVGKLNCPFCGARLGGFNFVSTPKCSCGQLAAVHLSKSRTDYQPTQAGRLMRPSVKYLSHPIVQSGCDKEALLTGGGSENRNHRLLNMARNNNDPGRLTEALCLEVRPTYFEMKNEKLLSKASEPKYQLFVPQLVTGRCATRAFHRKSHSLDLNISEKLTLLPTLYEIHSKTTAYSRLNETQPIDLSGLPLQSSKNSYSFQNPSSFGS

SEQ ID NO: 13632 - protein, 119 aa, Homo sapiens
  misc_feature (1)...(119): Xaa = X or * as defined in Table 2
SRAYCSLTLDFPGLKQSSHLSPQVAGPTGACYHAWPIFXILAQMRSHYVARAGLELLSSRDPPASASQSAGVTGISHHAWPVLLLYLAGTQSPEHFIYDGLDNVSSCLHANFSSLSYST

SEQ ID NO: 13633 - protein, 79 aa, Homo sapiens
  misc_feature (1)...(79): Xaa = X or * as defined in Table 2
TGNLQNGRKFSQPTHLTKGXYPESTMNSNKFTRKKQTTPSKSSSPQRRTHRQQRPWGSSQPLPAHSASPGRGSCSQHHF

SEQ ID NO: 13634 - protein, 114 aa, Homo sapiens
  DOMAIN (64)..(114): Peptidase family M20/M25/M40 domain identified by PFam, accession name Peptidase_M20, E-value=4.3e-14, PFam score of 52.4
  misc_feature (1)...(114): Xaa = X or * as defined in Table 2
DAWAWPLNRGFFRMMMDIGAAGVMQGGDSVELLDIPILKLPDGSDIPLPPILLGRLGFHPLKNTVCIYGHLDVQPAALEDGWDSEPFTLVERDGTLHGRGSTDDXVPLAGWINA

SEQ ID NO: 13635 - protein, 153 aa, Homo sapiens
  DOMAIN (84)..(111): Serpins proteins domain identified by eMATRIX, accession number BL00284D, p-value=6.538e-18, raw score of 16.34
  DOMAIN (1)..(153): Serpins (serine protease inhibitors) domain identified by PFam, accession name serpin, E-value=7.1e-58, PFam score of 198.3
HKSDGSTVSVPMMAQTNKFNYTEFTTPDGHYYDILELPYHGDTLSMFIAAPYEKEVPLSALTNILSAQLISHWKGNMTRLPRLLVLPKFSLETEVDLRKPLENLGMTDMFRQFQADFTSLSDQEPLHVAQALQKVKIEVNESGTVASSSTAVI

SEQ ID NO: 13636 - protein, 188 aa, Homo sapiens
  DOMAIN (44)..(71): Serpins proteins domain identified by eMATRIX, accession number BL00284D, p-value=3.471e-10, raw score of 16.34
  DOMAIN (48)..(111): Serpins (serine protease inhibitors) domain identified by PFam, accession name serpin, E-value=5.8e-17, PFam score of 60.0
  misc_feature (1)...(188): Xaa = X or * as defined in Table 2
NQASLSFLHLRPYSGHLIRGTPGRGWGKVGAASQRGPRLEQPLAAICRFSLETEVDLRKPLENLGMTDMFRQFQADFTSLSDQEPLHGPQALXKVKIEVNESGTVASSSTGESGSGEAPRVSPPSPFRITGPQTRKGPRSPLGTEQLCLCSAITHSPPVSQPGKRAWDHGTLFPRLMAPKFPDCEKAS

SEQ ID NO: 13637 - protein, 63 aa, Homo sapiens
  DOMAIN (3)..(52): kw TRANSCRIPTASE REVERSE II ORF2 domain identified by eMATRIX, accession number DM01354Z, p-value=5.451e-14, raw score of 9.06
  misc_feature (1)...(63): Xaa = X or * as defined in Table 2
FFFFTCTQMFITALFITAPNWKQPRCPSIGQXTNLFNEAVLSREESIKTKTRDRCYHMDRISK

SEQ ID NO: 13638 - protein, 73 aa, Homo sapiens
  misc_feature (1)...(73): Xaa = X or * as defined in Table 2
EMESCSITQAGVQWXDLSSLQPPPPGFQRVSCLSFPSSWDYRYLPPRLANFCIFSRDGVSPCXPGWSRTPDLR

SEQ ID NO: 13639 - protein, 82 aa, Homo sapiens
  misc_feature (1)...(82): Xaa = X or * as defined in Table 2
RLFFFFCFFEMESHSVTQAVVQWRDLGSLRPPPPGFKQFSCLSLLSSWDYRHTPPHPANFCIFSRDGVSPCWPGXSRTPDLR

SEQ ID NO: 13640 - protein, 48 aa, Homo sapiens
MSPNWRWGPPCLATPQGVTPSDTQPCQALGLGPHPRNVQPPIIISGTG

SEQ ID NO: 13641 - protein, 37 aa, Homo sapiens
  misc_feature (1)...(37): Xaa = X or * as defined in Table 2
GGRGCNQSXSRHCTPAWVTKQGPISDIDILIRPPLTI

SEQ ID NO: 13642 - protein, 40 aa, Homo sapiens
  misc_feature (1)...(40): Xaa = X or * as defined in Table 2
GCVQQGVNVQHCAGQQHLXENGGPGSSDCGWHRGHPLCRL

SEQ ID NO: 13643 - protein, 51 aa, Homo sapiens
  misc_feature (1)...(51): Xaa = X or * as defined in Table 2
MGFEGGPKILNWKFKKVXQSXSCLXKGQXESIFLNTXKVIRAGDTXKSVLG

SEQ ID NO: 13644 - protein, 29 aa, Homo sapiens
  misc_feature (1)...(29): Xaa = X or * as defined in Table 2
KKTMFRQKLFYKRKQLQKGPRPXGAGFKV

SEQ ID NO: 13645 - protein, 418 aa, Homo sapiens; identical to SEQ ID NO: 8354
  DOMAIN (90)..(122): GTP-binding elongation factors proteins domain identified by eMATRIX, accession number BL00301B, p-value=5.500e-31, raw score of 20.09
  DOMAIN (5)..(373): Elongation factor Tu family domain identified by PFam, accession name GTP_EFTU, E-value=5.6e-138, PFam score of 467.7

SEQ ID NO: 13646 - protein, 79 aa, Homo sapiens
  misc_feature (1)...(79): Xaa = X or * as defined in Table 2
MLKWIYRIFVNLFLVFVRFFNCSFLCAECISLPGQECGGAEVSSFSRTFPQHLLSLYLMXXXXXXXXFLQALGLCYPIQ

SEQ ID NO: 13647 - protein, 159 aa, Homo sapiens
  misc_feature (1)...(159): Xaa = X or * as defined in Table 2
LDNRCERCLTEGGWLTSHTAPRGKGTWGQKKEPASWGPWGCQWXRGAXWPTGCKQGRGGSPSPQPLGSGGRHEPGQAKATKASPSQGEGDKGRPRQQGPSWRSKSSPRPISDPPTPGGDKGPSPSTSLRLXTRLEPDLVSLGISAGPTRWTLLSAVQLQ

SEQ ID NO: 13648 - protein, 103 aa, Homo sapiens
  misc_feature (1)...(103): Xaa = X or * as defined in Table 2
KNFYLFFXDGVSLVAQAVQWRDLGSPQPPPPGLKLLSCLSLPSSWDYGHVPTMPGXFCTFSRDGVSPCWSSWSRNSRISDASACLGLPKCWEFTRRDNSAPRS

SEQ ID NO: 13649 - protein, 73 aa, Homo sapiens
  misc_feature (1)...(73): Xaa = X or * as defined in Table 2
YVAQAGLNLLASSQSSCLSLPKHWDYECEPLCLAFFFFLLXRQGLAMLPRILPPIKSISIRWRNGQKKMHQVL

SEQ ID NO: 13650 - protein, 357 aa, Homo sapiens
  DOMAIN (248)..(261): 0 kw ZK63212 YDR313C ENDOSOMAL III. domain identified by eMATRIX, accession number DM01970B, p-value=3.494e-09, raw score of 8.60
  DOMAIN (213)..(277): DHHC zinc finger domain identified by PFam, accession name zf -DHHC, E-value=0.052, PFam score of -13.2
AMGIHCITTTRTERSMPTTSAAVLPGPMRQWQLQLPPCIITQSRPCPSCHKSRIQPWPVTSPPPLSIPTIDTCCRPQELLPQLLLQQQPLLLLLQLPLHITGGIGAPCVALQPQSPLLERATVTGMRVSCPKLQQPRGILCTTWPGMSGSSMPIGRVTATNAKARCRHAADTALPAASASCVGTTTAACWAAAWASATTGPSCACCFMPPASCSTSLCCWALHCRPCCEPTRPSTWLPSSCFPGSCCRDHHCRLLGRCVGFGNYRPFLCLLSSCRRPSCSTSLCCWALHCRPCCEPTRPSTWLPSSCFPGSCCSQPHCPTTLWSTLTPLSHGRLWLQSQTLSSPWALWKSRVSGSLH

SEQ ID NO: 13651 - protein, 152 aa, Homo sapiens
MTTLKKNLADDDAVSCLVLGTENKELLVLDPEAFTILAKMSLPSVPVFLEVSGQFDVEFRLAAACRNGNIYILRRDSKHPKYCIELSAQPVGLIRVHKVLVVGSTQDSLHGFTHKGKKLWTVQMPAAILTMNLLEQHSRGLQAVMAGLANGE

SEQ ID NO: 13652 - protein, 166 aa, Homo sapiens
  DOMAIN (122)..(132): 499 kw TRYPSIN KINASE KUNITZ PANCREATIC domain identified by eMATRIX, accession number DM00522A, p-value=9.386e-09, raw score of 8.30
  misc_feature (1)...(166): Xaa = X or * as defined in Table 2
RCGSFLQLLLPMPKPADTALPAASASCVGTTTAACWAAAWASATTGPSCACCFMPPASCSTSLCCWALHCRPCCEPTRPSTWLPSSCFPGSCCSQAECLWHSLPWPSXRTRAWRVRCCAGLGCSSMGCCCCGARPHGSGLGASTPMTWVPATTCRQPWAPARRLGP

SEQ ID NO: 13653 - protein, 87 aa, Homo sapiens
  misc_feature (1)...(87): Xaa = X or * as defined in Table 2
NPRDGPTTAACWAAAWASATTGPSCACCFMPPASCSTSLCCWALHCRPCCEPTRPSTWLPSSCFPGSCCSQPXSPLSSCKPLKPPVF

SEQ ID NO: 13654 - protein, 64 aa, Homo sapiens
  misc_feature (1)...(64): Xaa = X or * as defined in Table 2
NEPRASTLTSSKAGQRQAPWTLFPNSYPLXEYPPANPFQGGPHDCRAQTKDMGAQAPRVPEAGP

SEQ ID NO: 13655 - protein, 182 aa, Homo sapiens
  misc_feature (1)...(182): Xaa = X or * as defined in Table 2
NGFRGAHSQCPPACVLPGQAMSTGGRQLPHPCMNPPSPGDSMDAVIKGAAVDLGGTWKGAKPLGLWHCGGXPIENRAGAGETXSLHIXTPVRSPGFLGTSPMGSPGPALKNHGSCARPLLSPLPYPPKERPLPPPWHLQSEDLPPPRGPEALMPQELGLERCXYPLPQVPRFRGTGAGLVQA

SEQ ID NO: 13656 - protein, 168 aa, Homo sapiens; identical to SEQ ID NO: 8356
  DOMAIN (9)..(21): GTP-binding elongation factors proteins domain identified by eMATRIX, accession number BL00301A, p-value=3.842e-13, raw score of 12.41
  DOMAIN (5)..(164): Elongation factor Tu family domain identified by PFam, accession name GTP_EFTU, E-value=1.8e-65, PFam score of 223.3

SEQ ID NO: 13657 - protein, 85 aa, Homo sapiens
  misc_feature (1)...(85): Xaa = X or * as defined in Table 2
LVCVFFFFFXERESCSVTQAGVQWCDLGSLQPPPPRSKQFSCLVLPSSWDYRHTPPCLANLCLIFKSRNPKYFIFIPFPNCYEWD

SEQ ID NO: 13658 - protein, 45 aa, Homo sapiens
CYAFNFCIYELVHLKIKDTYCHIFKLNLYRGKPPVKEKQYFSDKN

SEQ ID NO: 13659 - protein, 63 aa, Homo sapiens
  misc_feature (1)...(63): Xaa = X or * as defined in Table 2
MQILLKSKPKGSTKXXXXXXXXXXXXXXXXXXXXXXXXXXXXXXXXXXXXXXXXXXXXFRCHD

SEQ ID NO: 13660 - protein, 53 aa, Homo sapiens
  misc_feature (1)...(53): Xaa = X or * as defined in Table 2
KNLHXMESYSVAQAGVQWHDLGSVQPLPPGFKRFSCFSLLSSWDSRLYFRCHD

SEQ ID NO: 13661 - protein, 129 aa, Homo sapiens
  misc_feature (1)...(129): Xaa = X or * as defined in Table 2
REQDPACAWSSSAPNSSWSLHGEAVSHRECLSSPVLPGPDSSKALSSAAAALSMSSGRGGGSLVPFSGPVSGVARWIASCVAGESCLAXAGTRTRCTAPSEATXSSTRGLSRGAASLAASVHHGSRMSL

SEQ ID NO: 13662 - protein, 329 aa, Homo sapiens
  misc_feature (1)...(329): Xaa = X or * as defined in Table 2
LWGLVTSSCLSFSRRNFTTEIFQEDLMLSDPLNLLSLVMWLCTLWTSLAALSMSSGRGGGSLVPFSGPVSGVARWIASCVAGESCLAXAGTRTRCTAPSEATXSSTRGLSRGAASLAASVHPGSRMSLXVAGKPKGPGPTEAAPSCRSSSITTCTPLPTLSHSSSTADRALKASPGLSLRGPGSSGGELCARLSPSSSGMDTFPCLRSPTSSWRRFNNSLLALARPRAASAKPTALSTRWXITCRSCSELXTAKPCPVTVMGVLGGGFPPWEPVLPPLVSLLQAQQQHLASLPFPFSMRMVRGAQAPSCRVRLPRARGETPPRLPSGSR

SEQ ID NO: 13663 - protein, 118 aa, Homo sapiens
  misc_feature (1)...(118): Xaa = X or * as defined in Table 2
AEVQWRNLSSLQPPPPGFKXFLCLSLPRSXDYRLAPPCSANFCMVKTEFHHVGQVGLELLASSDPPPALASASQSAGITGVSHHAWPRASLLSLVIALKQASFFCSHAKPQVSQHFTN

SEQ ID NO: 13664 - protein, 66 aa, Homo sapiens
  misc_feature (1)...(66): Xaa = X or * as defined in Table 2
MIFFSFCVNTWCHSPFCATVTEYHSLIXXXXXXXXXXXXXXXXXXXXXXXWEGLFCCIITQRKVEG

SEQ ID NO: 13665 - protein, 105 aa, Homo sapiens
  misc_feature (1)...(105): Xaa = X or * as defined in Table 2
MHMYGXXXXXXXXXXXXXXXXXXXRISEHILCIFRSNYRMIFFSFCVNTWCHSPFCATVTEYPRLIXXXXXXXXXXXXXXXXXXXXXXXWEGLFCCIITQRKVEG

SEQ ID NO: 13666 - protein, 66 aa, Homo sapiens
  misc_feature (1)...(66): Xaa = X or * as defined in Table 2
MIFFSFCVNTWCHSPFCATVTEYHRLIXXXXXXXXXXXXXXXXXXXXXXXWEGLFCCIITQRKVEG

SEQ ID NO: 13667 - protein, 220 aa, Homo sapiens
  DOMAIN (97)..(129): GTP-binding elongation factors proteins domain identified by eMATRIX, accession number BL00301B, p-value=5.500e-31, raw score of 20.09
  DOMAIN (12)..(163): Elongation factor Tu family domain identified by PFam, accession name GTP_EFTU, E-value=4.5e-88, PFam score of 299.5
KLPLKAKMGKEKTHINIVVIGHVDSGKSTTTGHLIYKCGGIDKRTIEKFEKEAAEMGKGSFKYAWVLDKLKAERERGITIDISLWKFETSKYYVTIIDAPGHRDFIKNMITGTSQADCAVLIVAAGVGEFEAGISKNGQTREHALLAYTLGVKQLIVGVNKMDSTGIAILTGDFPSLEPRHVSTWLQHVVTIPTRNWHKCYCVGVVANFLNVSADFLNNF

SEQ ID NO: 13668 - protein, 105 aa, Homo sapiens
  misc_feature (1)...(105): Xaa = X or * as defined in Table 2
MHMYGXXXXXXXXXXXXXXXXXXXRISEHILCIFRSNYRMIFFSFCVNTWCHSPFCAPVTEYHRLIXXXXXXXXXXXXXXXXXXXXXXXWEGLFCCIITQRKVEG

SEQ ID NO: 13669 - protein, 112 aa, Homo sapiens
  misc_feature (1)...(112): Xaa = X or * as defined in Table 2
FFFFFFRQSLSVAQAGVQWCDLCSLXSPPPTLSTPLASASQVAGTTGAHHXTGIIFFVFVETVFCHVAQAGLELLGSSDPPASASQSAGITATVPSLLXLFIKQKQQKNRTY

SEQ ID NO: 13670 - protein, 367 aa, Homo sapiens
  DOMAIN (252)..(291): Somatomedin B domain proteins domain identified by eMATRIX, accession number BL00524C, p-value=6.727e-33, raw score of 23.93
DKDCSRAFLLYGSYSRAPALGGTARTLLGLLNEAKLEFHSVVLLEPGNKHAVTELSKIKKELIEKGHWDDVFLDSTQRPNGGKPIDNPPHPGSSNPLRKVIIEETGNLIQTIDVPDSTTAAAPENNPINLADVIAATGTTSKKNSSQDDLFPTSDTPRAKVLKIEEVSDTSSLQKEKPLLIFEILQRLSELKRFDMAVMFMSETEKKNRYGSEQEFVDDLKNMWFGLYSRGNEEGDSSGFEHVFSGEVKKGKVTGFHNWIRFYLEEKEGLVDYYSHIYDGPWDSYPDVLAMQFNWDGYYKEVGSAFIGSSPEFEFALYSLCFIARPGKVCQLSLGGYPLAVRTYTWDKSTYGNGKKYIATAYIVSST

SEQ ID NO: 13671 - protein, 294 aa, Homo sapiens
  DOMAIN (1)..(60): TPR Domain domain identified by PFam, accession name TPR, E- value=3.5e-06, PFam score of 34.0
MAYLKIQKYEEAEKDCTQAILLDGSYSKAFARRGTARTFLGKLNEAKQDFETVLLLEPGNKQAVTELSKIKKELIEKGHWDDVFLDSTQRQNVVKPIDNPPHPGSTKPLKKVIIEETGNLIQTNDVPDSTTAAAPENNPINLANVIAATGTTSKKNSSQDDLFPTSDTPRAKVLKIEEVSDTSSLQPQASLKQDVCQSYSEKMPIEIEQKPAQFATTVLPPIPANSFQLESDFRQLKSSPDMLYQYLKWLLSHCQDNTRAQRLEKAGWQLAFLRYYYHLLDVQKITVCMWQKAF

SEQ ID NO: 13672 - protein, 103 aa, Homo sapiens
  misc_feature (1)...(103): Xaa = X or * as defined in Table 2
LPPIPADSFQLESDFRQLKRSPDMLYHDXKQIEPSLYPKLFQKNLDPDVFNQIVKILHDFYHXGKKSPLLIFEILQRLSELKRFDMAVMFMSETEKKIARGII

SEQ ID NO: 13673 - protein, 312 aa, Homo sapiens; identical to SEQ ID NO: 9627

SEQ ID NO: 13674 - protein, 341 aa, Homo sapiens; identical to SEQ ID NO: 9628

SEQ ID NO: 13675 - protein, 47 aa, Homo sapiens; identical to SEQ ID NO: 10263
  misc_feature (1)...(47): Xaa = X or * as defined in Table 2

SEQ ID NO: 13676 - protein, 162 aa, Homo sapiens
  misc_feature (1)...(162): Xaa = X or * as defined in Table 2
RKVFKWLSAPLDVSNCPSLCKDXWXRVXRFMPETFPARXGAENPTLPCCHYSINHFTVFSFLFIFFFWRXSLTLVPQAGVQWRDLGSLQPLPPGFKRFSCLSLPSSWDYRCLPPCLANFLYFXXRQGFTVLARMVSISXPHDLPASASQSAVFSYLIFFLPY

SEQ ID NO: 13677 - protein, 127 aa, Homo sapiens
  misc_feature (1)...(127): Xaa = X or * as defined in Table 2
FWRPVRRQSEYKQVNKGQDSTFPIXCLQTNTDYRFRVCAXRRCLDTSQELSGAFSPSAGFVLQRSEVMLTGDMGSLHDSKMNSMMPTDEQIAAIIALGFATLAILFGFIXQSEYKQVNKGQDSTFPI

SEQ ID NO: 13678 - protein, 491 aa, Homo sapiens
  DOMAIN (14)..(26): GTP-binding elongation factors proteins domain identified by eMATRIX, accession number BL00301A, p-value=5.645e-11, raw score of 12.41
  DOMAIN (11)..(458): Elongation factor Tu family domain identified by PFam, accession name GTP_EFTU, E-value=8.9e-72, PFam score of 244.6
  misc_feature (1)...(491): Xaa = X or * as defined in Table 2
PLKAKMGKEKTHINIVVIGHVDTGKSTTTGHLIYKCGGIDKRTIEKFEKEAAEMGKGSFKYAXVLDKLKAERERGITIDISLWKFEDQQVLMWTIIDCPRDTETFIQKHDLQGTSQGLAWFGGPPFWGGSPLIVCCWCLVEFESWYSSKHWGRPREHALLGFTTGVWKQTKLFGVNKNWISTXGHPTAQKKILKEIVKGKSALTLRKIGYNPDTSSILCPISGLNGDHMPGAQMPNLPWFKEWKITRKDGNASGTTLLEALDCILPPTRPTDKPLGLPLQDVYKIGGIGTVPVGRVETGVLKPGMVVTFGPVNVTTEVKSVEMHHEALGEALPGDNVGFNVKNVSVKDVRRGNVAGDSKNDPPMEAAGFPAQVIILNHPGQISAGYAPVLDCHTAHIACKFAELKEKIDRRSGKKLEDGPKFLKSGDAAIVDMVPGKPMCVESFSDYPPLGCFAVRDMRQTVAVGVIKAVDKKAAGAGKVTKSAQKAQKAK

SEQ ID NO: 13679 - protein, 57 aa, Homo sapiens
  misc_feature (1)...(57): Xaa = X or * as defined in Table 2
FFFIFFFLLENLFXPSNFGSYKPVHCCVFFCCCCFFFLAVFFFVCFCFFFSFSFLFF

SEQ ID NO: 13680 - protein, 90 aa, Homo sapiens
  misc_feature (1)...(90): Xaa = X or * as defined in Table 2
PPRFFPEFFYSGPPKPPFFKTPVFLGVKPGVSSSPPYQKKPTNFGPKMGALXRIPLFETPIWVFPIKGFHKKKPPVLNXPPTRKPPPDKI

SEQ ID NO: 13681 - protein, 41 aa, Homo sapiens
  misc_feature (1)...(41): Xaa = X or * as defined in Table 2
FFNKKPPPFGRGWPFLVPATLRFXGXKIFPPPPPPEVRFPG

SEQ ID NO: 13682 - protein, 23 aa, Homo sapiens
  misc_feature (1)...(23): Xaa = X or * as defined in Table 2
LVWSXEASKIPGGAEAAHPPTTF

SEQ ID NO: 13683 - protein, 76 aa, Homo sapiens
  misc_feature (1)...(76): Xaa = X or * as defined in Table 2
FFFESGSRSVTQAGVQXHSLGSLQPLPPRFKXFSCLSLPSSWDYTHVPTRPANFCIFSGDGVSSCWPGWSRTPNLR

SEQ ID NO: 13684 - protein, 160 aa, Homo sapiens
  misc_feature (1)...(160): Xaa = X or * as defined in Table 2
NQVIWESFQPAGRHGHPFAPSLAPSASSFLSSFCPSGKAEETLESIXSSGKPGVGEGATSLFPSISXMFWEGPENGTQEPAGMPIPHTPPSCSNPAIHSPGGTGAPGRREEALHCPPXHIPSHPPSRPPWLAPLSLRFPFTPMAVNDQDRSHVCFPLGLI

SEQ ID NO: 13685 - protein, 136 aa, Homo sapiens
  misc_feature (1)...(136): Xaa = X or * as defined in Table 2
NLVYVSSICFTWTFHFERKKFYVSHIVLYKVASPIMKCLYCHSGHTQVVQYLNGEAARLGQGLLCXNVIIFICLLSLSLSLFFSFFGPMLKMXNFVFKXCFYNFIRKPKFVFFVTLDFNSLYIGTSNVITVLNKFH

SEQ ID NO: 13686 - protein, 115 aa, Homo sapiens
  misc_feature (1)...(115): Xaa = X or * as defined in Table 2
KVEDPSPVWRNSIFWKFVITFKVYFFCLFVFLETESLSVVQAGVQWHSLGSLQPLPPGFKQFSCLSLLSSXDYRCTPPRPADFCIFGRDGVSPYWSGXSXTPDLMLCPAWLPKVL

SEQ ID NO: 13687 - protein, 63 aa, Homo sapiens
  misc_feature (1)...(63): Xaa = X or * as defined in Table 2
FFFXIGPHSVAQAGVRWCDLGSCSLNLPGSSDPPASASQVAGTTGVHYYTQLIFKFFIEMRAP

SEQ ID NO: 13688 - protein, 100 aa, Homo sapiens
  misc_feature (1)...(100): Xaa = X or * as defined in Table 2
LDTPLGAAPAAFFLPSLNQCLIYNPMPVRPLKAWRLKTGILTEPRVKGEALGAGMMPTGVSTASSPSYPLAPLGPRLPLQDCMHQALSXAPLSDALCIAL

SEQ ID NO: 13689 - protein, 101 aa, Homo sapiens
  misc_feature (1)...(101): Xaa = X or * as defined in Table 2
KLFFLKNVLLLNFFLPLLPSPVLVCYCCFSFFFLYLCLFFTVVLGSARNKXKLFFLKNVLLLNFFLPLLPSPVLVCYCCFSFFFLYLCLFFTVVLGSARNK

SEQ ID NO: 13690 - protein, 112 aa, Homo sapiens
  misc_feature (1)...(112): Xaa = X or * as defined in Table 2
SLLQPSPAFFSPAFCGLLXPSVVQPSPAFSSLLXPSPAFSSLLXPSLLWPSFSGLLXPSLTFSNLLXSSLLPSTEETPAGQRQELQLFPVGGAADAYFPFKCFKILSSECLK

SEQ ID NO: 13691 - protein, 56 aa, Homo sapiens
  misc_feature (1)...(56): Xaa = X or * as defined in Table 2
LSLLSSXDYRXAPSQLANFSIFLXRWGLAVLPRLVSDSWPQMILLPPVPDVLELKA

SEQ ID NO: 13692 - protein, 36 aa, Homo sapiens
EKKMADFHKEEMDDQDKDKAKGRKETLILERENKSM

SEQ ID NO: 13693 - protein, 57 aa, Homo sapiens
GRVVMAWVVQGFFLGFFFFFFVFLTLSCLKLKHSSDVWGETSLLKWVLVLAFWGGGP

SEQ ID NO: 13694 - protein, 101 aa, Homo sapiens
  misc_feature (1)...(101): Xaa = X or * as defined in Table 2
PPPPKXILXRAPNPPLSSSSFSNPPTWGPGPQPPPSKFSKFARFPFLPPPFPFKKEPPSSSLFFPTKEGTVIXKNPPFSGFQSPDSIKXGRVEPPGGTKRG

SEQ ID NO: 13695 - protein, 145 aa, Homo sapiens
  misc_feature (1)...(145): Xaa = X or * as defined in Table 2
RTSAREKRDLNRLKKLGDSSKNSDCXSVSSNTDADATQEKNNATSNRKSSVGVKKNSKSRTLTRQSMSRIPASSNSTSSKLTHINNSRVPKKLKKPAKPLLSKIKLRNHCKRLEHKNASRKLEMGNLVLKEPKVVLYNKLPHKKR

SEQ ID NO: 13696 - protein, 48 aa, Homo sapiens
  DOMAIN (17)..(31): RIBOSOMAL PROTEIN S12E FAMILY SIGNATURE domain identified by eMATRIX, accession number PR00972D, p-value=1.000e-18, raw score of 10.15
  DOMAIN (1)..(45): Ribosomal protein S12e domain identified by PFam, accession name Ribosomal_S12e, E-value=4.6e-05, PFam score of 0.8
LGEWVGLCKIDREGKPRKVVGCSCVVVKDYGKESQAKDVIEEYFKCKK

SEQ ID NO: 13697 - protein, 212 aa, Homo sapiens
  DOMAIN (24)..(38): RIBOSOMAL PROTEIN S12E FAMILY SIGNATURE domain identified by eMATRIX, accession number PR00972A, p-value=6.625e-17, raw score of 8.01
  DOMAIN (5)..(191): Ribosomal protein S12e domain identified by PFam, accession name Ribosomal_S12e, E-value=1.8e-37, PFam score of 137.9
  misc_feature (1)...(212): Xaa = X or * as defined in Table 2
PTAMAEEGIAAGGVMDVNTALQEVLKTALIHDGLARGIREAAKALDKYVYQSQYCGFLQPEQNCHPREEGMEFMVLAQKFXMASVLPETXEKRQAHLCVLASNCDEPMYVKLVEALCAEHQINLIKVDDNKKLGEWVGLLXILWVLATGTKLPPKGRRHGVHGVSAKVLNGIRPTGNLGKGAKPIFVCLHPTVMSLCMSSWWRPFVLNTKST

SEQ ID NO: 13698 - protein, 63 aa, Homo sapiens; identical to SEQ ID NO: 9095
  DOMAIN (1)..(37): Ribosomal protein S12e proteins domain identified by eMATRIX, accession number BL01189A, p-value=3.638e-25, raw score of 14.27
  DOMAIN (1)..(57): Ribosomal protein S12e domain identified by PFam, accession name Ribosomal_S12e, E-value=0.0025, PFam score of -21.2

SEQ ID NO: 13699 - protein, 135 aa, Homo sapiens
  DOMAIN (38)..(74): Ribosomal protein S12e proteins domain identified by eMATRIX, accession number BL01189A, p-value=1.000e-40, raw score of 14.27
  DOMAIN (5)..(133): Ribosomal protein S12e domain identified by PFam, accession name Ribosomal_S12e, E-value=9.6e-95, PFam score of 328.2
PTAMVEEGIAAGGVMDVNTALQEVLKTALIHDGLARGIREAAKALDKRQAHLCVLAFNCDEPMYVKLVEALCAEHQINLIKVDDNKKLGEWVGLCKIDREGKPRKVVGCSCVVVKDYGKESQAKDVIEEYFKCKK

SEQ ID NO: 13700 - protein, 56 aa, Homo sapiens
  misc_feature (1)...(56): Xaa = X or * as defined in Table 2
HTDYIPNGPRTNEPTAHELIGXHXXPSHFRTXVEQYNINADLKSXYQHSMDRMLSG

SEQ ID NO: 13701 - protein, 151 aa, Homo sapiens
  misc_feature (1)...(151): Xaa = X or * as defined in Table 2
HLVLASLLACLASIFLPSVGLGQCDLVGSQKTIPRNEGLPRKQTFLSDLLLPSCLWFPYSPPRLAIKTTIPLHQKPALKPKNITLTFLFLSVXNWAIGKLFGPLSGLXGQEGPPFQRESCAIXGRKECCAKRPKRILTDRPRWVPHSVYQH

SEQ ID NO: 13702 - protein, 110 aa, Homo sapiens
  misc_feature (1)...(110): Xaa = X or * as defined in Table 2
FFFFDIGSCFFAXAGVQWHDHGSLQPQPPGLKXHDIPTTASXVAGTTGAHHHAXLIFXLSVKMGSSPLVAPGWSMKSWTQANPSLLQPPQSAWDYRCEPPCLVRNTFEYV

SEQ ID NO: 13703 - protein, 92 aa, Homo sapiens
  misc_feature (1)...(92): Xaa = X or * as defined in Table 2
VLGIWRVPGGSGKMEKRESEKQILPRPIGCIWERGKSPGEAPSALPMPWSNPPPGTCTPSCPTYRCTPLPRXTDAPSRHTHLAPRNGETIFA

SEQ ID NO: 13704 - protein, 57 aa, Homo sapiens
  misc_feature (1)...(57): Xaa = X or * as defined in Table 2
MWGWKEKIKINTFVYCWWEFKLVQNFWSTTWQHILKFXMSFDALLGIYPKYILTNVT

SEQ ID NO: 13705 - protein, 127 aa, Homo sapiens
  DOMAIN (53)..(84): Translationally controlled tumor protein domain identified by eMATRIX, accession number BL01002C, p-value=6.143e-26, raw score of 21.97
  DOMAIN (1)..(127): Translationally controlled tumor protein domain identified by PFam, accession name TCTP, E-value=2.7e-52, PFam score of 187.2
LSTGTSSAMVSRTEGNIDDSLIGGNASAEGPEGEGTESTVITGVDIVMNHHLQETSFTKEAYKKYIKDYMKSIKGKLEEQRPERVKPFMTGAAEQIKHILANFKNYQFFIGENMNPDGMVALLDYRE

SEQ ID NO: 13706 - protein, 74 aa, Homo sapiens; identical to SEQ ID NO: 13519

SEQ ID NO: 13707 - protein, 198 aa, Homo sapiens
  DOMAIN (153)..(181): Translationally controlled tumor protein domain identified by eMATRIX, accession number BL01002D, p-value=4.706e-26, raw score of 18.24
  DOMAIN (11)..(181): Translationally controlled tumor protein domain identified by PFam, accession name TCTP, E-value=5.3e-101, PFam score of 349.0
RRRRLPSVAIMIIYRDLISHDEMFSDIYKIREIADGLCLEVEGKMVSRTEGNIDDSLIGGNASAEGPEGEGTESTVITGVDIVMNHDLQETCFTKEAYKKYIKDYMKSIKGKLEEQRPERVKPFMTGAAEQIKHILANFKNYQFFIGENMNPDGMVALLDYREDGVTPYMIFFKDGLEMEKCVSTRKWVKINNVKKTF

SEQ ID NO: 13708 - protein, 126 aa, Homo sapiens; identical to SEQ ID NO: 9141
  misc_feature (1)...(126): Xaa = X or * as defined in Table 2

SEQ ID NO: 13709 - protein, 136 aa, Homo sapiens
  misc_feature (1)...(136): Xaa = X or * as defined in Table 2
RATEKWKGRKNHELSWKCFPLKIFFRRSLAMVLCTSKLRPSVLSMRTTKARECLSGSSNAXGFTSSRLRHSLSRFCARNHVGMIPVAXTXALFLSSAPSLPKMPALPGWLCGLDKPSSFSGDFLEPKGFFFALAPP

SEQ ID NO: 13710 - protein, 65 aa, Homo sapiens; identical to SEQ ID NO: 9142
  misc_feature (1)...(65): Xaa = X or * as defined in Table 2

SEQ ID NO: 13711 - protein, 114 aa, Homo sapiens
  misc_feature (1)...(114): Xaa = X or * as defined in Table 2
LFSSLSGGMQSLSLGQTGISEGLNXLTSMAPGNLWHMRNNFLFGSRCWMTRFSAENIFKSVSFRLFGVKCHNTDSEPLKNEDLLKNLLTMGVDIDMARKRQPGVFHRMITNEQD

SEQ ID NO: 13712 - protein, 220 aa, Homo sapiens; identical to SEQ ID NO: 11484
  misc_feature (1)...(220): Xaa = X or * as defined in Table 2

SEQ ID NO: 13713 - protein, 86 aa, Homo sapiens
  misc_feature (1)...(86): Xaa = X or * as defined in Table 2
LIDLRFIYLFIYLRXGLRLVPXAGVHWCNLGSLQSLPPGFKRFSCLSLSSSWDYRHAPPHPAHFCIFSRDAVSPCWSGXSQTPDLR

SEQ ID NO: 13714 - protein, 89 aa, Homo sapiens; identical to SEQ ID NO: 9139

SEQ ID NO: 13715 - protein, 123 aa, Homo sapiens
  misc_feature (1)...(123): Xaa = X or * as defined in Table 2
ACSSCFHAGLEHVRVRGSCHSGVAAARRSEAPDLFCXPPSLPVPSTPFSPSPAPAMNQATSDPTHTCPTRLPTCPNAAPXAGPTADTPSXGIPDLPAVVLKTPQHLDLPVCSLCGPPLGPTET

SEQ ID NO: 13716 - protein, 112 aa, Homo sapiens
  misc_feature (1)...(112): Xaa = X or * as defined in Table 2
ETRSYSVTQAGAEWHDHRSLXPXPPGLRXSSHFSLPSNWDYRCVPPHSANFLVIFVEIVFHHVAQAGLELLGSSDLPTXASQSTGITGVNHCPAEKEVLPREKAMQRGGSQA

SEQ ID NO: 13717 - protein, 83 aa, Homo sapiens
  misc_feature (1)...(83): Xaa = X or * as defined in Table 2
GMNERGNITKEIKKIIWEYYEXLGTSQLDTLDXTNSQKDTNYQNQLTKYRKYGLEPITSDYISNFKRLPKKSPGLDGFTGEFI

SEQ ID NO: 13718 - protein, 1066 aa, Homo sapiens
  DOMAIN (820)..(840): GELSOLIN FAMILY SIGNATURE domain identified by eMATRIX, accession number PR00597F, p-value=9.206e-10, raw score of 16.29
  DOMAIN (1032)..(1066): Villin headpiece domain identified by PFam, accession name VHP, E-value=7.8e-19, PFam score of 76.0
FGEPTSEQTGTAAGKTIAQTTAPVSWKPQDSSEQPQEKLCKNPCAMFAAGEIKTPTGEGLLDSPSKTMSIKERLALLKKSGEEDWRNRLSRRQEGGKAPASSLHTQEAGRSLIKKRVTESRESQMTIEERKQLITVREEAWKTRGRGAANDSTQFTVAGRMVKKGLASPTAITPVASAICGKTRGTTPVSKPLEDIEARPDMQLESDLKLDRLETFLRRLNNKVGGMHETVLTVTGKSVKEVMKPDDDETFAKFYRSVDYNMPRSPVEMDEDFDVIFDPYAPKLTSSVAEHKRAVRPKRRVQASKNPLKMLAAREDLLQEYTEQRLNVAFMESKRMKVEKMSSNSNFSEVTLAGLASKENFSNVSLRSVNLTEQNSNNSAVPYKRLMLLQIKGRRHVQTRLVEPRASALNSGDCFLLLSPHCCFLWVGEFANVIEKAKASELATLIQTKRELGCRATYIQTIEEGINTHTHAAKDFWKLLGGQTSYQSAGDPKEDELYEAAIIETNCIYRLMDDKLVPDDDYWGKIPKCSLLQPKEVLVFDFGSEVYVWHGKEVTLAQRKIAFQLAKHLWNGTFDYENCDINPLDPGECNPLIPRKGQGRPDWAIFGRLTEHNETILFKEKFLDWTELKRSNEKNPGELAQHKEDPRTDVKAYDVTRMVSMPQTTAGTILDGVNVGRGYGLVEGHDRRQFEITSVSVDVWHILEFDYSRLPKQSIGQFHEGDAYVVKWKFMVSRLYCVRGEVPVEGNLLEVACHCSSLRSRTSMVVLNVNKALIYLWHGCKAQAHTKEVGRTAANKIKEQCPLEAGLHSSSKVTIHECDEGSEPLGFWDALGRRDRKAYDCMLQDPGSFNFAPRLFVLSSSSGDFAATEFVYPARAPSVVSSMPFLQEDLYSAPQPALFLVDNHHEVYLWQGWWPIENKITGSARIRWASDRKSAMETVLQYCKGKNLKKPAPKSYLIHAGLEPLTFTNMFPSWEHREDIAEITEMDTEVSNQITLVEDVLAKLCKTIYPLADLLARPLPEGVDPLKLEIYLTDEDFEFALDMTRDEYNALPAWKQVNLKKAKGLF

SEQ ID NO: 13719 - protein, 1855 aa, Homo sapiens
  DOMAIN (1483)..(1504): GELSOLIN FAMILY SIGNATURE domain identified by eMATRIX, accession number PR00597D, p-value=3.189e-11, raw score of 12.77
  DOMAIN (1820)..(1855): Villin headpiece domain identified by PFam, accession name VHP, E-value=7.8e-19, PFam score of 76.0
DFNKKNLSFLGFPRQRKVSSFQKEFSLEDKEQLANHERGIDAQLLVALPKVAELRQIFEPKKKEFLEMKRKERIARRLEGIENDTQPILLQSCTGLVTHRLLEEDTPRYMRASDPASPHIGRSNEEEETSDSSLEKQTRSKYCTETSGVHGDSPYGSGTMDTHSLESKAERIARYKAERRRQLAEKYGLTLDPEADSEYLSRYTKSRKEPDAVEKRGGKSDKQEESSRDASSLYPGTETMGLRTCAGESKDYALHAGDGSSDPEVLLNIENQRRGQELSATRQAHDLSPAAESSSTFSFSGRDSSFTEVPRSPKHAHSSSLQQAASRSPSFGDPQLSPEARPRCTSHSETPTVDDEEKVDERAKLSVAAKRLLFREMEKSFDEQNVPKRRSRNTAVEQRLRRLQDRSLTQPITTEEVVIAATLQASAHQKALAKDQTNEGKELAEQGEPDSSTLSLAEKLALFNKLSQPVSKAISTRNRIDTRQRRMNARYQTQPVTLGEVEQVQSGKLIPFSPAVNTSVSTVASTVAPMYAGDLRTKPPLDHNASATDYKFSSSIENSDSPVRSILKSQAWQPLVEGSENKGMLREYGETESKRALTGRDSGMEKYGSFEEAEASYPILNRAREGDSHKESKYAVPRRGSLERANPPITHLGDEPKEFSMAKMNAQGNLDLRDRLPFEEKVEVENVMKRKFSLRAAEFGEPTSEQTGTAAGKTIAQTTAPVSWKPQDSSEQPQEKLCKNPCAMFAAGEIKTPTGEGLLDSPSKTMSIKERLALLKKSGEEDWRNRLSRRQEGGKAPASSLHTQEAGRSLIKKRVTESRESQMTIEERKQLITVREEAWKTRGRGAANDSTQFTVAGRMVKKGLASPTAITPVASAICGKTRGTTPVSKPLEDIEARPDMQLESDLKLDRLETFLRRLNNKVGGMHETVLTVTGKSVKEVMKPDDDETFAKFYRSVDYNMPRSPVEMDEDFDVIFDPYAPKLTSSVAEHKRAVRPKRRVQASKNPLKMLAAREDLLQEYTEQRLNVAFMESKRMKVEKMSSNSNFSEVTLAGLASKENFSNVSLRSVNLTEQNSNNSAVPYKRLMLLQIKGRRHVQTRLVEPRASALNSGDCFLLLSPHCCFLWVGEFANVIEKAKASELATLIQTKRELGCRATYIQTIEEGINTHTHAAKDFWKLLGGQTSYQSAGDPKEDELYEAAIIETNCIYRLMDDKLVPDDDYWGKIPKCSLLQPKEVLVFDFGSEVYVWHGKEVTLAQRKIAFQLAKHLWNGTFDYENCDINPLDPGECNPLIPRKGQGRPDWAIFGRLTEHNETILFKEKFLDWTELKRSNEKNPGELAQHKEDPRTDVKAYDVTRMVSMPQTTAGTILDGVNVGRGYGLVEGHDRRQFEITSVSVDVWHILEFDYSRLPKQSIGQFHEGDAYVVKWKFMVSTAVGSRQKGEHSVRAAGKEKCVYFFWQGRHSTVSEKGTSALMTVELDEERGAQVQVLQGKEPPCFLQCFQGGMVVHSGRREEEEENVQSEWRLYCVRGEVPVEGNLLEVACHCSSLRSRTSMVVLNVNKALIYLWHGCKAQAHTKEVGRTAANKIKEQCPLEAGLHSSSKVTIHECDEGSEPLGFWDALGRRDRKAYDCMLQDPGSFNFAPRLFILSSSSGDFAATEFVYPARAPSVVSSMPFLQEDLYSAPQPALFLVDNHHEVYLWQGWWPIENKITGSARIRWASDRKSAMETVLQYCKGKNLKKPAPKSYLIHAGLEPLTFTNMFPSWEHREDIAEITEMDTEVSNQITLVEDVLAKLCKTIYPLADLLARPLPEGVDPLKLEIYLTDEDFEFALDMTRDEYNALPAWKQVNLKKAKGLF

SEQ ID NO: 13720 - protein, 2281 aa, Homo sapiens
  DOMAIN (1909)..(1930): GELSOLIN FAMILY SIGNATURE domain identified by eMATRIX, accession number PR00597D, p-value=3.189e-11, raw score of 12.77
  DOMAIN (2247)..(2281): Villin headpiece domain identified by PFam, accession name VHP, E-value=7.8e-19, PFam score of 76.0
NFNKKNLSFLGFPRQRKVSSFQKEFSLEDKEQLANHERGIDAQLLVALPKVAELRQIFEPKKKEFLEMKRKERIARRLEGIENDTQPILLQSCTGLVTHRLLEEDTPRYMRASDPASPHIGRSNEEEETSDSSLEKQTRSKYCTETSGVHGDSPYGSGTMDTHSLESKAERIARYKAERRRQLAEKYGLTLDPEADSEYLSRYTKSRKEPDAVEKRGGKSDKQEESSRDASSLYPGTETMGLRTCAGESKDYALHAGDGSSDPEVLLNIENQRRGQELSATRQAHDLSPAAESSSTFSFSGRDSSFTEVPRSPKHAHSSSLQQAASRSPSFGDPQLSPEARPSTGKPKHEWFLQKDSEGDTPSLINWPSRVKVREKLVKEESARNSPELASESVTQRRHQPAPVHYVSFQSEHSAFDRVPSKAAGSTRQPIRGYVQPADTGHTAKLVTPETPENASECSWVASATQNVPKPPSLTVLEGDGRDSPVLHICESKAEEEEGEGEGEEKEEDVCFTEALEQSKKTLLALEGDGLVRSPEDPSRNEDFGKPAVSTVTLEHQKELENVAQPPQAPHQPTERTGRSEMVLYIQSEPVSQDAKPTGHNREASKKRKVRTRSLSDFTGPPQLQALKYKDPASRRELELPSSKTEGPYGEISMLDTKVSVAQLRSAFLASANACRRPELKSRVERSAEGPGLPTGVERERGSRKPRRYFSPGESRKTSERFRTQPITSAERKESDRCTSHSETPTVDDEEKVDERAKLSVAAKRLLFREMEKSFDEQNVPKRRSRNTAVEQRLRRLQDRSLTQPITTEEVVIAATEPIPASCSGGTHPVMARLPSPTVARSAVQPARLQASAHQKALAKDQTNEGKELAEQGEPDSSTLSLAEKLALFNKLSQPVSKAISTRNRIDTRQRRMNARYQTQPVTLGEVEQVQSGKLIPFSPAVNTSVSTVASTVAPMYAGDLRTKPPLDHNASATDYKFSSSIENSDSPVRSILKSQAWQPLVEGSENKGMLREYGETESKRALTGRDSGMEKYGSFEEAEASYPILNRAREGDSHKESKYAVPRRGSLERANPPITHLGDEPKEFSMAKMNAQGNLDLRDRLPFEEKVEVENVMKRKFSLRAAEFGEPTSEQTGTAAGKTIAQTTAPVSWKPQDSSEQPQEKLCKNPCAMFAAGEIKTPTGEGLLDSPSKTMSIKERLALLKKSGEEDWRNRLSRRQEGGKAPASSLHTQEAGRSLIKKRVTESRESQMTIEERKQLITVREEAWKTRGRGAANDSTQFTVAGRMVKKGLASPTAITPVASAICGKTRGTTPVSKPLEDIEARPDMQLESDLKLDRLETFLRRLNNKVGGMHETVLTVTGKSVKEVMKPDDDETFAKFYRSVDYNMPRSPVEMDEDFDVIFDPYAPKLTSSVAEHKRAVRPKRRVQASKNPLKMLAAREDLLQEYTEQRLNVAFMESKRMKVEKMSSNSNFSEVTLAGLASKENFSNVSLRSVNLTEQNSNNSAVPYKRLMLLQIKGRRHVQTRLVEPRASALNSGDCFLLLSPHCCFLWVGEFANVIEKAKASELATLIQTKRELGCRATYIQTIEEGINTHTHAAKDFWKLLGGQTSYQSAGDPKEDELYEAAIIETNCIYRLMDDKLVPDDDYWGKIPKCSLLQPKEVLVFDFGSEVYVWHGKEVTLAQRKIAFQLAKHLWNGTFDYENCDINPLDPGECNPLIPRKGQGRPDWAIFGRLTEHNETILFKEKFLDWTELKRSNEKNPGELAQHKEDPRTDVKAYDVTRMVSMPQTTAGTILDGVNVGRGYGLVEGHDRRQFEITSVSVDVWHILEFDYSRLPKQSIGQFHEGDAYVVKWKFMVSTAVGSRQKGEHSVRAAGKEKCVYFFWQGRHSTVSEKGTSALMTVELDEERGAQVQVLQGKEPPCFLQCFQGGMVVHSGRREEEEENVQSEWRLYCVRGEVPVEGNLLEVACHCSSLRSRTSMVVLNVNKALIYLWHGCKAQAHTKEVGRTAANKIKEQCPLEAGLHSSSKVTIHECDEGSEPLGFWDALGRRDRKAYDCMLQDPGSFNFAPRLFILSSSSGDFAATEFVYPARAPSVVSSMPFLQEDLYSAPQPALFLVDNHHEVYLWQGWWPIENKITGSARIRWASDRKSAMETVLQYCKGKNLKKPAPKSYLIHAGLEPLTFTNMFPSWEHREDIAEITEMDTEVSNQITLVEDVLAKLCKTIYPLADLLARPLPEGVDPLKLEIYLTDEDFEFALDMTRDEYNALPAWKQVNLKKAKGLF

SEQ ID NO: 13721 - protein, 206 aa, Homo sapiens
  misc_feature (1)...(206): Xaa = X or * as defined in Table 2
AGAKGGGPGGRGMKKTNSLTPLLSAYRLLPVELSKGWGILGFSVCPFAPGLMAKGVSPCDTAVKRDNIHXVGGGVSXKCPXRSSXWSGPVPALTALFLVDNHHEVYLWQGWWPIENKITGSARIRWASDRKSAMETVLQYCKGEAPSNMPAARNRWGSPSGMRSQETPFPFCACQPASIHKAWQVVDENPIFSPLKPFEDVIKFLD

SEQ ID NO: 13722 - protein, 166 aa, Homo sapiens
  misc_feature (1)...(166): Xaa = X or * as defined in Table 2
PNPTGTLMLARKWCPDGLQSLPPDVLGSXGEHLLSCLCQERACSSNSRRPRQAWTGSQGSRVINFFFFAKVGTCHQGPNHQKAPKAPGTPPTPSYPGTPSRQLLWQWVQPRPALPASSPCSRHQLYLPRQAMSWLLSPAPSVPLDFSGASPVWATLCFPHPRLPHR

SEQ ID NO: 13723 - protein, 75 aa, Homo sapiens
  misc_feature (1)...(75): Xaa = X or * as defined in Table 2
KKGSPFFPKVGGQGGNLGLLEPLPPKLKKFFCFKPPKRGDYSSSSSSSPDSSSSKKKGVSPFWPGGVXTPKEGGL

SEQ ID NO: 13724 - protein, 68 aa, Homo sapiens
  misc_feature (1)...(68): Xaa = X or * as defined in Table 2
FNSYYMYVYVYVHICVFLYVCICIYRYIYLCIAVITCLMNEWXXFKCKGNDARGYEKKLPSKYEIEKE

SEQ ID NO: 13725 - protein, 43 aa, Homo sapiens
  misc_feature (1)...(43): Xaa = X or * as defined in Table 2
RKKPEPEKTCFDNITGNTYPCLSTYEHDSDXYYVNRTXLCAER

SEQ ID NO: 13726 - protein, 257 aa, Homo sapiens
  misc_feature (1)...(257): Xaa = X or * as defined in Table 2
HSYSHSHGHCGSPAGDTEQGYKPVWPVCSLFPDGSHPGVXQPIHEPAQGRGGLPPWGAAXTPRAWRLAXRPRGXAALPWAXTSPGRPASAPLAHTGSGCPSRPTRAPGPSPIPIQNIKRPYPGEAFVPSRAGPTVGVTRSFHLAPSLPPFPSSXLSPSLPPRTTTSCTRAILTPSSXQKLLYPPSRPVVLLVRRARPPAAAPTSEEPPERSPWETPHAAPSQLHELHETHSVAQKSDLLPAPEAMXPGSVSSRFLLY

SEQ ID NO: 13727 - protein, 243 aa, Homo sapiens
  DOMAIN (205)..(224): ALPHA/BETA GLIADIN FAMILY SIGNATURE domain identified by eMATRIX, accession number PR00209B, p-value=6.967e-10, raw score of 4.88
  misc_feature (1)...(243): Xaa = X or * as defined in Table 2
GRRRPGPKPPRAPGRDRDRCNFXPCCPPGAKSSAACCCSDIRRAARAIPLGNSPCSPLSAPXAPXNPLCRTVMGRSPMTLSLGSRTPTSLPAPFPWSPRFGEXPTHPRARSLGTLWPMPTTPXIQAATPWRRAXPPATQASTPHSLRGSSSSSQPRLAPLRPTSSRACMAGPTTPAAGALGPVTLGVLTPPQAWASLRTPGRLLTSLSPRQPLQQRQWQQQQPQLQPQPRPLWQPCRRHRTRI

SEQ ID NO: 13728 - protein, 112 aa, Homo sapiens
  misc_feature (1)...(112): Xaa = X or * as defined in Table 2
CTTAIPTPEEMTRLRSMNRQLQINVDCALTEVDLLQSRGNFDPKAMNNFYDNIXPGPDVPPKPSKKGPTDSEPKTSSGPCSNIGCLLSCKFFHACSRFQNPPICIHQSTLAA

SEQ ID NO: 13729 - protein, 71 aa, Homo sapiens
  misc_feature (1)...(71): Xaa = X or * as defined in Table 2
RVGARGKMTALASGQLGPLMCQFGLPAXAVEAANKGDVEAFAKAMQNISKPEQIXGDTKDKTDXKEDLSLD

SEQ ID NO: 13730 - protein, 192 aa, Homo sapiens
  misc_feature (1)...(192): Xaa = X or * as defined in Table 2
SRAQVVLHCVLREWAGGRRSPAPPSPWPVLHVPDPQSWQLSSVALGCSPGWSSALAWLFLQALGMFSAALASGQLGPLMCQFGLPAEAVEAANKGGKVAAPGTPRPEPGAGSIPVPLDLQKWGXGGKGHSPSALDPIALIPSFGARVRHHLVSLTCSDVEAFAKAMQNNAKPEQKEGDTKDKKDEEEDMSLD

SEQ ID NO: 13731 - protein, 135 aa, Homo sapiens
  misc_feature (1)...(135): Xaa = X or * as defined in Table 2
LQPGPAGAQQVDLASVVXPPEIMAPILANADVQERLLPYLPSGESLPQTADEIQNTLTLAPSSQQALGMFSAALASGQVGAPFMCQFGLPAEAVEAANKGDVEAFAKAMQNNAKPEQKEGDTKDKKDEEEDMSLD

SEQ ID NO: 13732 - protein, 116 aa, Homo sapiens
  misc_feature (1)...(116): Xaa = X or * as defined in Table 2
LSRPRHHKASTTGAQMQGRTRSMRQEPEKAILTLRGSREPTPRAPQLVPSVPSSWLFLSLHSIAQTPLPHTHSTHTPRSQPALPSQAPVPVPQHPPPHPEXALSPDNLFSMILKSP

SEQ ID NO: 13733 - protein, 123 aa, Homo sapiens
  misc_feature (1)...(123): Xaa = X or * as defined in Table 2
QRLAEMSNAIERKHATKMTYQPTNGTLTSGYVADRRVKHHSGGEEPFQAQKQEPHPGTSRQXQTRVNLHSLPDPEMHEQTYFRGMYRKLGGWKAGPEGTFYDIPRYVTAYTFAHTRPADIRAM

SEQ ID NO: 13734 - protein, 114 aa, Homo sapiens
  misc_feature (1)...(114): Xaa = X or * as defined in Table 2
SFFFVLRRSLAVAQAEVQXRNLGSLQPPPPEFKRFSCFSLPSGWDYRRPPPRPANFLYFXXRGVSTMWGQGWSRTPDLRGDLAHLGSPKVLGMTGREPPCLGPLNGLTFLPEIS

SEQ ID NO: 13735 - protein, 42 aa, Homo sapiens
  misc_feature (1)...(42): Xaa = X or * as defined in Table 2
FFVFLGETGFHRVSQDGLNLLTLXSARLSLPRCWDYRREPPH

SEQ ID NO: 13736 - protein, 41 aa, Homo sapiens; identical to SEQ ID NO: 11212
  misc_feature (1)...(41): Xaa = X or * as defined in Table 2

SEQ ID NO: 13737 - protein, 41 aa, Homo sapiens; identical to SEQ ID NO: 11212
  misc_feature (1)...(41): Xaa = X or * as defined in Table 2

SEQ ID NO: 13738 - protein, 41 aa, Homo sapiens; identical to SEQ ID NO: 11212
  misc_feature (1)...(41): Xaa = X or * as defined in Table 2

SEQ ID NO: 13739 - protein, 41 aa, Homo sapiens; identical to SEQ ID NO: 11212
  misc_feature (1)...(41): Xaa = X or * as defined in Table 2

SEQ ID NO: 13740 - protein, 41 aa, Homo sapiens; identical to SEQ ID NO: 11212
  misc_feature (1)...(41): Xaa = X or * as defined in Table 2

SEQ ID NO: 13741 - protein, 38 aa, Homo sapiens
  misc_feature (1)...(38): Xaa = X or * as defined in Table 2
VIEHLVSQDGLDFLTSXSARLGLPKCWDYRREPPRPVH

SEQ ID NO: 13742 - protein, 62 aa, Homo sapiens
  misc_feature (1)...(62): Xaa = X or * as defined in Table 2
IFFVFLVETGFHHVSQDGLDLLTSXSTRLGLPKCWDYRREPPRPAPSSPIFHTVAPIQYTHP

SEQ ID NO: 13743 - protein, 41 aa, Homo sapiens; identical to SEQ ID NO: 11212
  misc_feature (1)...(41): Xaa = X or * as defined in Table 2

SEQ ID NO: 13744 - protein, 63 aa, Homo sapiens
AGGGQLNVNFMGKPLYVKHEPLRTHQNIRHHNNRCSNCKPGQQVDDFTLWTVFPKMSEHDSPS

SEQ ID NO: 13745 - protein, 74 aa, Homo sapiens
  DOMAIN (20)..(56): Ribosomal protein L32e proteins domain identified by eMATRIX, accession number BL00580A, p-value=7.652e-37, raw score of 17.63
  DOMAIN (22)..(74): Ribosomal protein L32 domain identified by PFam, accession name Ribosomal_L32e, E-value=0.00013, PFam score of 2.4
HLLLGIMAALRPLVKPKIVKKRTKKFIRHQSDRYVKIKRNWRKPRGIDNRVRRRFKGQCAVKKMSRQLMCTFSV

SEQ ID NO: 13746 - protein, 73 aa, Homo sapiens
  misc_feature (1)...(73): Xaa = X or * as defined in Table 2
EKELAFFPQGEMQGGNLGXLKPPPLRXRDFSCLALPRGGNGRGAPPSPTNFGFLGGNGVYPSGPGGFETPDLK

SEQ ID NO: 13747 - protein, 59 aa, Homo sapiens
MDEKTKKAEEMALSLTRAVAGGDEQVAMKCAIWLAEQRVPLSVQLKPEVSPTQDIRFLM

SEQ ID NO: 13748 - protein, 165 aa, Homo sapiens
  DOMAIN (29)..(44): WILM'S TUMOUR PROTEIN SIGNATURE domain identified by eMATRIX, accession number PR00049D, p-value=7.102e-09, raw score of 0.00
  misc_feature (1)...(165): Xaa = X or * as defined in Table 2
EFRAPGPLGPRTRRPARRVAGSGGPGXGTIFPAPPPSPAPLPGPPLSLSLPPKPLPLRRTGASREERGLCLETRDARGAPASGGPPGLGTPRLGGVRASFPRFFPPRLVPFPPAPSADLSRRPLPSHRPTQDPGLVIGQCDASRLPRGQRGTHRAWAAPEATRPG

SEQ ID NO: 13749 - protein, 280 aa, Homo sapiens
  misc_feature (1)...(280): Xaa = X or * as defined in Table 2
RAFSFNREEPTADEQGLPTSVAGRPAVIAAVPSWHARGTERRAPGRTDXHHPPHLGAQPSAALLPGLPXHCGHISAGGRREAGNIPGRKIIYPPPQGFYGSNNGQHQAYIKLSDARSLTRXIQSSMTSCRVLRXGPSLPSAGSSPGLGMSCLTSGTSCGYMTSSWPPPTDADLLCSRDCVVSRAGSPGLXLXHGLGPPPVSPRSLRTCPMRHXSAEQETFLFSFPHPNLLGRPLPNSKLRGRQPLLSKTLSWHQPSRGLIWCCGSGFGDFCGLKIEQKMS

SEQ ID NO: 13750 - protein, 148 aa, Homo sapiens
  misc_feature (1)...(148): Xaa = X or * as defined in Table 2
VFALKPGTPGALPQVGVLRDLERPGWVVSGRPFPASSHLGLVPFPPAPKCGTLSRRPLPSHRPTQDPGLVTGQLXCFPTAAGTATAHTGLGPRRKPHRPWLSCSWSPRLFPGDPEVSIFPRKARSPPGEWGTATPDGREDQESRGNGP

SEQ ID NO: 13751 - protein, 96 aa, Homo sapiens
  misc_feature (1)...(96): Xaa = X or * as defined in Table 2
HEPQLNSNNVALHGAVIPGPPFLFGACINLMNFMVALFIPEYKIARGVQKHTYKHNGSLTNTPXRGSDEDIEPLLRDSTIWELFSFEEPGNQCPEL

SEQ ID NO: 13752 - protein, 89 aa, Homo sapiens
  misc_feature (1)...(89): Xaa = X or * as defined in Table 2
PRFKLFPCLSLLSSXDYRXVPAITPGXFLYFFXVKTGFHHVGQTGLELLTSGDPPTSASQSAGITGMSHCTWPISFLYLWHTGGKKKEC

SEQ ID NO: 13753 - protein, 72 aa, Homo sapiens
  misc_feature (1)...(72): Xaa = X or * as defined in Table 2
HEWMGTRVGEWMDEWKEGWKMDGKVDKXMNGWMEGCLYQWLNTEILCQELIPYTCLCLFSGWIYIFKQSILD

SEQ ID NO: 13754 - protein, 94 aa, Homo sapiens
VWPWDQPGSQGEGRDQREPSGCRLQAPLSLSLCSFQASCSSRSSGAASTERSDGAACRETLLTAVSGWTNRGHSHPRGKSCARPRPPPEDAATQ

SEQ ID NO: 13755 - protein, 124 aa, Homo sapiens
  DOMAIN (23)..(61): Synapsins proteins domain identified by eMATRIX, accession number BL00415O, p-value=9.289e-09, raw score of 3.44
  misc_feature (1)...(124): Xaa = X or * as defined in Table 2
RHEVKPQWTPGXDTDHLPNLSVALGPTRQPGRRQRPEGTQVPSIPASSIPASQSQPPQSQPPNPSLLHPRTPTPSLPIPASLIPASPKTQTLXIPASEVGTVSNPTPWTRKLGPGEANRLSLMV

SEQ ID NO: 13756 - protein, 183 aa, Homo sapiens
  DOMAIN (60)..(96): Ribosomal protein L32e proteins domain identified by eMATRIX, accession number BL00580A, p-value=5.800e-34, raw score of 17.63
  DOMAIN (62)..(176): Ribosomal protein L32 domain identified by PFam, accession name Ribosomal_L32e, E-value=8.7e-67, PFam score of 235.3
LPTEVAAISFSLAIGKHSATVFSPWAGKPPSRILPHLGPLLPQKASWPPLRPLVKPKFVKKRPKKFIRHQSDRYVKIKRNWRKPRGIDNRVRRRFKGQILMPNIGYGSNKKTKHMLPSGFRKFLVHNVKEQGLEVLLMCNKSYCAEIAHNVSSKNRKAIVERAAQLAIRVTNPNARLRSEENE

SEQ ID NO: 13757 - protein, 48 aa, Homo sapiens
  misc_feature (1)...(48): Xaa = X or * as defined in Table 2
HERREVTVIRRGGKHQLRLVPTRWAGKGLLGXSICFWSFSLGHHWSVC

SEQ ID NO: 13758 - protein, 68 aa, Homo sapiens
  misc_feature (1)...(68): Xaa = X or * as defined in Table 2
LSMVSTVLVTTIMKLCSYXKXQIQSWLPCLTHTKTHTHTHTHTHTHKVLHTLTCKQYYAIIGNVLSFY

SEQ ID NO: 13759 - protein, 29 aa, Homo sapiens
EFFILTFKNNIFIYRYNRISREWTQKYAM

SEQ ID NO: 13760 - protein, 68 aa, Homo sapiens
  DOMAIN (1)..(65): Ubiquitin-conjugating enzyme domain identified by PFam, accession name UQ_con, E-value=7.4e-06, PFam score of -5.3
RKGSICLDILRSQWSPALTMSKVLLSICSLLWDPNPDDPLVPEIARIYKSDRDKYNRICREWTQKYAM

SEQ ID NO: 13761 - protein, 105 aa, Homo sapiens
  misc_feature (1)...(105): Xaa = X or * as defined in Table 2
FFFFFFPLFRQCLTLSPRLEYSGTISAHCSLSQPGSSDPPTSALRVAETTGTRHHAWLIFVFXVETGLHHVVLAGLELMGSRNQPTSASQSAGITGVNHRAWLTW

SEQ ID NO: 13762 - protein, 69 aa, Homo sapiens
  misc_feature (1)...(69): Xaa = X or * as defined in Table 2
KEKIFPSPGFKHPPPPPFXKTPLKGKRIFFSPPRKNWPPQRIFKKAPPSSSSSSSSSSSSAQIXSFNSP

SEQ ID NO: 13763 - protein, 103 aa, Homo sapiens
  misc_feature (1)...(103): Xaa = X or * as defined in Table 2
WFFFWLCHPGWSAVAWWHDLSSLQPPPPRLMXFSCLSLLSNWDYRRAPPFLASFVFLVDTAFRHLGQAGLELLTSSDPPTLASQSAGITGVSHRTQLRSSFDS

SEQ ID NO: 13764 - protein, 111 aa, Homo sapiens
HVLISSSALILIISCLLLALELVCCCLSRSSRNTFSRCTYSGLSKTPPHWAARARLDDVFSLRTFSSHSLNMELVQDLTASAPMYSSTSRDPPASASQSAGITSVSHRARP

SEQ ID NO: 13765 - protein, 85 aa, Homo sapiens
  misc_feature (1)...(85): Xaa = X or * as defined in Table 2
CLGLLVIFVCNFQSIRDYRRPPLHXLIFFVFLVEMGFYYVGXAGLELLTSXSARLLASLRAGITGVSHRARPRSFVFGFGWQDHG

SEQ ID NO: 13766 - protein, 147 aa, Homo sapiens
  misc_feature (1)...(147): Xaa = X or * as defined in Table 2
MSEIKKRNSFNPQARKVDTNLYXXXXXXXXXXXXXXXXXXXXXXXXXXXXXXXXXXXXXXXXXXXXXXXXXXXXXXXXXXXXXXXXXXIFKEWTMMQMICEHFDEKVVIRRIQHKFNCKHAYLGRVGGRVGXRGFAMTLNRASFXGA

SEQ ID NO: 13767 - protein, 131 aa, Homo sapiens
  DOMAIN (57)..(101): Osteopontin proteins domain identified by eMATRIX, accession number BL00884B, p-value=4.316e-28, raw score of 12.47
PRVRAEHSIVGTRLVSGQLQPSQPSADHGKLTTMRIAGICFCLLGITCAIPDKQADSGSSEEKHNAESSEETNDFIQETLPSKSNESHDHMDDMDDEDDDDHVDSQDSIDSNDSDDVDDTDDAHQSDEAHH

SEQ ID NO: 13768 - protein, 94 aa, Homo sapiens
  misc_feature (1)...(94): Xaa = X or * as defined in Table 2
MLTNHLHHWPFFKNXXXXXXXXXXXXXXXXXXXXXXXXXXXXXXXXXXXXXXXXXXXXXXXXXXXXXXXXXXXXXXXXXXXTRCPRITTFFLRG

SEQ ID NO: 13769 - protein, 84 aa, Homo sapiens
  misc_feature (1)...(84): Xaa = X or * as defined in Table 2
RRLFFFFLRWSFALVAQAREQWCNLGXLQPPSPGFKQFFCFSLLNSWDYRRAPSCPANFVFLVEMGLYIFKEWDNDGRMICEAF

SEQ ID NO: 13770 - protein, 136 aa, Homo sapiens
  misc_feature (1)...(136): Xaa = X or * as defined in Table 2
GVLRLSSACPQACPSSTSTGPXAALAGFTTTGSGLCWAWTPPSSSFVSGSSREAPSGTATTSWTRNVTATSATTANRMAMCTSTRTARLLLAPTTNCSPRSKTLTPIDPCSGGCRLTCKDNTPRLGTGQGRRQGTF

SEQ ID NO: 13771 - protein, 73 aa, Homo sapiens
  misc_feature (1)...(73): Xaa = X or * as defined in Table 2
THIGLPKCXDYKCEPPVHRQFLXFXVETRFHHISQAGFKLTTSGDPPALASQSGRITGVTTRTQPLNGFYKVM

SEQ ID NO: 13772 - protein, 86 aa, Homo sapiens
  misc_feature (1)...(86): Xaa = X or * as defined in Table 2
VVVVSQYAAERPSVVAHACNPSTLGGRGRWLTXGQQVETSLASGYLPTLASPKCWDYRREPLRLACFNFFVETRNLLTVLPISVQQ

SEQ ID NO: 13773 - protein, 50 aa, Homo sapiens [sequence omitted]

SEQ ID NO: 13774 - protein, 223 aa, Homo sapiens
  misc_feature (1)...(223): Xaa = X or * as defined in Table 2
GVGGVGRGMLPPAPPRAPAPGFPSTILWPSPPLLXLPPPGLGTGFLPFGHGCPPLSQSPWILFPWGGAQAQPPLXPXPRHPCPPHPRQSYGRQLPTFWLAPPSFCLSLVFSSLSLILSLSSVSRSVLLPXHPPPHISFHPLGFLSXASPISGVGGIKAFLPLRFQPPFXPLIPTTPLSLPKMGALWGRLXHSTPAQAMGSRAPFSGLAQASTYLLQPFGVVGS

SEQ ID NO: 13775 - protein, 157 aa, Homo sapiens
  misc_feature (1)...(157): Xaa = X or * as defined in Table 2
AGKFPLRSGHFPCFLTVESVCSGPFKPSVIPLSPCGASAPSPRFLLSPSPGLVRAVLHCTLLVASXAPPPASPPGVAVFSPPVSIWHPSRLPGSYGLCGQHLRDPTKPRSRTHFRAGVPPLVSCSLPSPNLPLMTSGVQRPPKGLENSLLQLADLNK

SEQ ID NO: 13776 - protein, 127 aa, Homo sapiens
  DOMAIN (16)..(38): Globins profile domain identified by eMATRIX, accession number BL01033A, p-value=3.250e-20, raw score of 16.94
  DOMAIN (1)..(125): Globin domain identified by PFam, accession name globin, E- value=1.6e-40, PFam score of 145.7
VKAAWGKVGAQAGEYGAEALERMFLSFPTTKTYFPHFDLSHGSAQVKGHGKKVADALTNAEAHVDDMPNALTALSDLHAHKLRVDPVNFKLLSHCLLVILADHLPAEFTPAEHASMDKFMASVSTGA

SEQ ID NO: 13777 - protein, 884 aa, Homo sapiens
  DOMAIN (808)..(851): 1 kw MIND INHIBITOR DIVISION CONTROL domain identified by eMATRIX, accession number DM01756B, p-value=9.813e-09, raw score of 22.91
  DOMAIN (287)..(517): RepA family domain identified by PFam, accession name RepA, E -value=3.1e-166, PFam score of 565.6
MSFFSTLKTALSLKEKLAATGVLVLICALVGAGFAWERHQLKQAIEKIGSLDQAVKERDKSIMDLNQTIETMNKAEQHFHSQEVKNESEQAKYADRQMERKAEVQKQLVAAGNVRQRIPADTQRLLRESISEFNADADKGIFMSDKVTVKQTINKATSIYKIEQITVGKPGSEQYRRAFELADQLGLKHPDCIEHVFPTYADEQCTHVLTEEDFFSTEEREGVDRCIGVICSSVSDELFPNVPEYGGIGYQFLYEGDELKCYEHDIESKAKELTVNSNNTVQPVALMRLGVFVPKPSKSKGESKEIDATKAFSQLEIAKAEGYDDIKITGPRLDMDTDFKTWIGVIYAFSKYGLSSNTIQLSFQEFAKACGFPSKRLDAKLRLTIHESLGRLRNKGIAFKRGKDAKGGYQTGLLKSWRADSKLWELFQLDYRVLLQHHALRALPKKEAAQAIYTFIESLPQNPLPLSFARIRERLALQSAVGEQNRIIKKAIEQLKTIGYLDCSIEKKGRESFVIHTYLIPAIPPQHIIQCDFPLSHILDFYSPSSTHRSCRASRSHQLIESEAWLPIEAGNHQNDSGYNLNVEEIRVLYAWRMPKHVVTHLAKDQLHKVAQRANRMLNVLTEQVQLQKDELHANEFYQVYAKAALAKLPLLTRANVDYANIIDIYEHRGVPKYRDRYSERGVSKTVSTVSLAHAMRAHPHLLMEDLRILVIDLDPQSSATMFLSHKHSIGIVNATSAQAMLQNVSREELLEEFIVPSVVPGVDVMPASIDDAFIASDWRELCNEHLPGQNIHAVLKENVIDKLKSDYDFILVDSGPHLDAFLKNALASANILFTPLPPATVDFHSSLKYVARLPELVKLISDEGCECQLATNIEKQTNNWANP

SEQ ID NO: 13778 - protein, 350 aa, Homo sapiens
  DOMAIN (182)..(224): Osteopontin proteins domain identified by eMATRIX, accession number BL00884C, p-value=1.000e-40, raw score of 22.45
  DOMAIN (44)..(350): Osteopontin domain identified by PFam, accession name Osteopontin, E-value=3.9e-167, PFam score of 568.7
TDCRVDPRVRPRVRVEHSIVGTRLVSCQLQPSQPNADQGKLTTMRIAVICFCLLGITCAIPVKQAESGSSEEKQLYNKYPDAVATWLNPDPSQVRQNLLGPTGPFPSKVQRKGHGPHGMIWDGWKVDDDPCVDSQDSIGLGTTLDDVDDTDDSHQSDESHHSDESDELVPDFPTDLPATEVFTPVVPTVDTYDGRGDSVVYGLRSKSKKFRRPDIQYPDATDEDITSHMESEELNGAYKAIPVAQDLNAPSDWDSRGKDSYETSQLDDQSAETHSHKQSRLYKRKANDESNEHSDVIDSQELSKVSREFHSHEFHSHEDMLVVDPKSKEEDKHLKFRISHELDSASSEVN

SEQ ID NO: 13779 - protein, 315 aa, Homo sapiens
  DOMAIN (189)..(277): ParB-like nuclease domain identified by PFam, accession name ParBc, E-value=5.8e-14, PFam score of 59.8
MPASIDDAFIASDWRELCNEHLPGQNIHAVLKENVIDKLKSDYDFILVDSATVDFHSSLKYVARLPELVKLISDEGCECQLATNIGFMSKLSNKADHKYCHSLAKEVFGGDMLDVFLPRLDGFERCGESFDTVISANPATYVGSADALKNARIAAEDFAKAVFDLEQVFKLSTGRQATFIEEVIPPNQVESDTFVDQHNNGRDQASLTPKSLKSIRSTIKHQQFYPAIGVRRATGKIEILDGSRRRASAILENVGLRVLVTDQEISVQEAQNLAKDVQTALQHSIREIGLRLMRMKNDGMSQKDIAAKEGLSQAK

SEQ ID NO: 13780 - protein, 1408 aa, Homo sapiens
  DOMAIN (187)..(230): 1 kw MIND INHIBITOR DIVISION CONTROL domain identified by eMATRIX, accession number DM01756B, p-value=4.822e-15, raw score of 22.91
  DOMAIN (152)..(263): ParA family ATPase domain identified by PFam, accession name ParA, E-value=7.4e-24, PFam score of 92.7
LGFLLRLSEMPRKQGDYRTSDMEIRGRVEQRVGYTIEQINHMRDVFGTRLRRAEDVFPPVIGVAAHKGGVYKTSVSVHLAQDLALKGLRVLLVEGNDPQGTASMYHGWVPDLHIHAEDTLLPFYLGEKDDVTYAIKPTCWPGLDIIPSCLALHRIETELMGKFDEGKLPTDPHLMLRLAIETVAHDYDVIVIDSAPNLGIGTINVVCAADVLIVPTPAELFDYTSALQFFDMLRDLLKNVDLKGFEPDDLAILFHVTAVHMFSLEGIENLPFELQRNFQLMRDLDQRTEGVKRATRKNENFGCSPASSFSHLRERRDPGFSHDPGDQRQEAQNLAKAVQTALQHSIREIGLRLMRSKNDGMSQKDIAAKEGLSQAKVTRALQAASAPEELVALFPVQSELTFSDYKTLCAVGDEMGNKNLEFDQLIQNISPEINDILSIEEMAEDEVKNKILRLITKEASLLTDKGSKDKSVVTELWKFEDKDRFARKRVKGRAFSYEFNRLSKEKSKLSNLREYQNRIAGIAKRSKAVLGWASTAQFGTDNQFIKDDAARAASILEAARKDPVFAGISDNATAQIATAWASALADYAAAHKSMPRPEILASCHQTLENCLIESTRNSMDATNKAMLESVAAEMMSVSDGVMRLPLFLAMILPVQLGAATADACTFIPVTRDQSDIYEVFNVAGSSFGSYAAGDVLDMQSVGVYSQLRRRYVLVASSDGTSKTATFKMEDFEGQNVPIRKGRTNIYVNRIKSVVDNGSGSLLHSFTNAAGEQITVTCSLNYNIGQIALSFSKAPDKGTEIAIETEINIEAAPELIPLINHEMKKYTLFPSQFVIAAEHTFRTLKEYLSHEQDMLRLRIMIWRTLATDTFDIALPVNQSFDVWATIIRGKFQTVYRDIIERVKSSGAMGMFAGADAASFFQQLPKISSSQPKTISRLHLLFLPNFLKLTDTFLETIEENGVVLGIHDTAHKGSLAWLAFLLACFLGEGSSFAKTARYETVGKGLLLLLVTAGEVRIVSEHTFSAAATSSHLMCLFNLCQVSQGKNVLKPFPQIEALVRAPNPQEHQEEAKETDTADSLCKLDLGIARTRVRIRRPHTSPALSPQHPTPAVHAHLPVDEPHASAVQTSVSTSVGEPTRWVPGAPSGVAGTAGWRRAGRLKAVATELLPMNGSLWSTQARISPAFLLKVNQTLMDYRTGRVQPAIPQSLPEALRLAADLAEQKQRLEQKMLMDAPKVEFAERVATASGVLIGNYAKVLGLGQNYLFTWLRDNGILIATGERRNVPKQDSISHAGHILSQCANLAATTSEYFIHKPHRLIAAETGYSQSTVVRAFREAVNKGILSVEIVIGDHRERRANLYRFTPSFLAFAQQAKNALIESKLKISSAATKSKVTAWEARARGHYYHKGDSR

SEQ ID NO: 13781 - protein, 880 aa, Homo sapiens
  DOMAIN (218)..(233): UTEROGLOBIN SIGNATURE domain identified by eMATRIX, accession number PR00486A, p-value=8.286e-09, raw score of 7.28
TTTLVRLPCRSPKRRIKALRSQLRGLPMMRVPSFRLRVTSPTFMKSLTWQVHLLVLMLLVMFWTCNPSVCTASYVAAMCWWQAPMAPAKPQPSRWKTSKARMYQSQKVAKTSTLTVLSLLLITVPAAYFTRLLMLLLPLMRVPSFRLRVTSPTSMKSLTWQVHLLVLMLLVMFWTCNPSVCTASYVAAMCWWQAPMAPAKPQPSRWKTSKARMYQSEKVAITSTLTVLSLLLITVPAAYFTRLLMLLLPLMRVPSFRLRVTSPTSMKSLTWQVHLLVLMLLVMFWTCNPSVCTASYVAAMCWWQAPMAPAKPQPSRWKTSKARMYQSEKVALTSTLTVLSLLLITVPAAYFTRLLMLLVSKSLCTCSLNYNIGQIALSFSKAPDKGTEIAIERGANGDVLDMQSVGVYSQLRRRYVLVASSDGTSKTATFKMEDFEGQNVPIRKGRTNIYVSRIKSVVDNGSGSLLHSFTNAAGEQITVTCSLNYNIGQIALSFSKAPDKGTEIAIERATDDACTFIPVTRDQSDIYEVFNVAGSSFGSYAAGDVLDMQSVGVYSQLRRRYVLVASSDGTSKTATFKMEDFEGQNVPIPKGRKNIYVNRIKSVVDNGSGSLLHSFTNAAATADACTFIPVTRDQSDIYEVFNVAGSSFGSYAAGDVLDMQSVGVYSQLRRRYVLVASSDGTSKTATFKMEDFEGQNVPIRKGRNNIYVNRIKSVVDNGSGSLLHSFTNAAATADACTFIPVTRDQSDIYEVFNVAGSSFGSYAAGDVLDMQSVGVYSQLRRRYVLVASSDGTSKTATFKMEDFEGQNVPIRKGRTNIYVNRIKSVVDNGSGSLLHSFTNAAGEQITVTCSLNYNIGQIALSFSKAPDKGTEIAIERGSST

SEQ ID NO: 13782 - protein, 1013 aa, Homo sapiens
  DOMAIN (91)..(118): Mrp family proteins domain identified by eMATRIX, accession number BL01215A, p-value=6.745e-09, raw score of 9.75
  DOMAIN (290)..(381): ParB-like nuclease domain identified by PFam, accession name ParBc, E-value=0.00018, PFam score of 28.3
MLNVLTEQVQLQKDELHANEFYQVYAKAALAKLPLLTRANVDYAVSEMEEKGYVFDKRPAGSSMKYAMSIQNIIDIYEHRGVPKYRDRYSEAYVIFISNLKGGVSKTVSTVSLAHAMRAHPHLLMEDLRILVIDLDPQSSATMFLSHKHSIGIVNATSAQAMLQNVSREELLEEFIVPSVVPGVDVMPASIADDAFIASDWKELCNEHLPLVKLISDEGCECQLATNIGFMSKLSNKADHKYCHSLAKEVFGGDMLDVFLPRLDGFERCGESFDTVISANPATYVGSADALKNARIAAEDFAKAVFDRISYAKIIKKFRSTIKHQQFYPAIGVRRATGKIEILDGSRRRASAILENVGLRVLVTDQEISVQEAQNLAKDVQTALQHSIREIGLRLMRMKNDGMSQKDIAAKEGLSQAKVTRALQAASAPEELVALFPVQSELTFSDYKTLCAVGDEMGNKNLEFDQLIQNISPEINDILSIEEMAEDEVKNKILRLITKEASLLTDKGSKDKSVVTELWKFEDKDRFARKRVKGRAFSYEFNRLSKEKSKLSNLREYQNRIADIAKRSKAVLGWASTAQFGTDNQFIKDDAARAASILEAARKDPVFAGISDNATAQIATAWASALADYAAAHKSMPRPEILASCHQTLENCLIESTRNSMDATNKAMLESVAAEMMSVSDGVMRLPLFLAMILPVQLGAATADACTFIPVTRDQSDIYEVFNVAGSSFGSYAAGDVLDMQSVGVYSQLRRRYVLVASSDGTSKTATFKMEDFEGQNVPIRKGRTNIYVNRIKSVVDNGSGSLLHSFTNAAGEQITVTCSLNYNIGQIALSFSKAPDKGTEIAIETEINIEAAPELIPLINHEMKKYTLFPSQFVIAAEHTVQAAYEAQREFGLDLGSLQFRTLKEYLSHEQDMLRLRIMIWRTLATDTFDIALPVNQSFDVWATIIRGKFQTVYRDIIERVKSSGAMGMFAGADAASFFKQLPKDFFQPAEDYIQTPYVHYIGTPFRTTHST

SEQ ID NO: 13783 - protein, 869 aa, Homo sapiens
  DOMAIN (394)..(437): 1 kw MIND INHIBITOR DIVISION CONTROL domain identified by eMATRIX, accession number DM01756B, p-value=9.813e-09, raw score of 22.91
  DOMAIN (189)..(344): RepA family domain identified by PFam, accession name RepA, E -value=1.2e-05, PFam score of -98.4
MSFFSTLKTALSLKEKLAATGVLVLICALVGAGFAWERHQLKQAIEKIGSLDQAVKERDKSIMDLNQTIETMNKAEQHFHSQEVKNESEQAKYADRQMERKAEVQKQLVAAGNVRQRIPADTQRLLRESISEFNADADKGTVKQTINKVISIYKIEQVTVGKPGSEQCRRAFELADQLGLKHPDCIEHVFPTYAQEQCAHVLTEEDCFSNAERDGDDRCIGVICSWEFAKACGFASKRLDVKLRLAIHESLGRLRSKGIAFKRGKDAKGGYQPGLLKVERFDAALAHIFDTSDPSTAHNSMRLHQLIESEAWLPIEAGNHQNDSGYNLNNVSREELLEEFIVPSVVPGVDVMPASIDDAFIASDWRELCNEHLPGQNIHAVLKENVIDKLKSDYDFILVDSGPHLDAFLKNALASANILFTPLPPATVDFHSSLKYVARLPELAASAPEELVALFPVQSELTFSDYKTLCAVGDEMGYKNLEFDQLIQNISPEINDILSIEEMAEDEVKNKILRLITKEASLLTDKGSKDKSVVTELWKFEDKDRFARKRVKGRAFSYEFNRLSKEKSKLSNLREYQNRIADIAKRSKAVLGWASTAQFGTDNQFIKDDAARAASILEAARKDPVFAGISDNATAQIATAWASALADYAAAHKSMPRPEILASCHQTLENCLIESTRNSMDATNKAMLESVAAEMMSVSDGVMRLPLFLAMILPVQLGAATADACTFIPVTRDQSDIYEVFNVAGSSFGSYAAGDVLDMQSVGVYSQLRRRYVLVASSDGTSKTATFKMEDFEGQNVPIRKGRTNIYVNRIKSVVDNGSGSLLHSFTNAAGEQITVTCSLNYNIGKIALWFSKEPDKGTEIPFEGENQF

SEQ ID NO: 13784 - protein, 1519 aa, Homo sapiens
  DOMAIN (287)..(528): RepA family domain identified by PFam, accession name RepA, E -value=3.3e-181, PFam score of 615.4
MSFFSTLKTALSLKEKLAATGVLVLICALVGAGFAWERHQLKQAIEKIGSLDQAVKERDKSIMDLNQTIETMNKAEQHFHSQEVKNESEQAKYADRQMERKAEVQKQLVAAGNVRQRIPADTQRLLRESISEFNADADKGIFMSDKVTVKQTINKATSIYKIEQITVGKPGSEQYRRAFELADQLGLKHPDCIEHVFPTYADEQCTHVLTEEDFFSTEEREGVDRCIGVICSSVSDELFPNVPEYGGIGYQFLYEGDELKCYEHDIESKAKELTVNSNNTVQPVALMRLGVFVPKPSKSKGESKEIDATKAFSQLEIAKAEGYDDIKITGPRLDMDTDFKTWIGVIYAFSKYGLSSNTIQLSFQEFAKACGFPSKRLDAKLRLTIHESLGRLRNKGIAFKRGKDAKGGYQTGLLKVGRFDADLDLIELEADSKLWELFQLDYRVLLQHHALRALPKKEAAQAIYTFIESLPQNPLPLSFARIRERLALQSAVGEQNRIIKKAIEQLKTIGYLDCSIEKKGRESFVIHTSKVPDKRSSQLIESEAWLPIEAGNHQNDSGYSLNVEEIRVLYAWRMPKHVVTHLAKDQLHKVAQRANRMLNVLTEQVQLQKDELHANEFYQVYAKAALAKLPLLTRANVDYAVSEMEEKGYVFDKRPAGSSMKYAMSIQNIIDIYEHRGVPKYRDRYSEAYVIFISNLKGVGELISDEGCECQLATNIGFMSKLSNKADHKYCHSLAKEVFGGDMLDVFLPRLDGFERCGESFDTVISANPATYVGSADALKNARIAAEDFAKAVFDPSGDRVEQVFKLSTGRQATFIEEVIPPNQVESDTFVDQHNNGRDQASLTPKSLKSIRSTIKHQQFYPAIGVRRATGKIEILDGSRRRASAILENVGLRVLVTDQEISVQEAQNLAKDVQTALQHSIREIGLRLMRMKNDGMSQKDIAAKEGLSQAKVTRALQAASAPEELVALFPVQSELTFSDYKTLCAVGDEMGNKNLEFDQLIQNISPEINDILSIEEMAEDEVKNKILRLITKEASLLTDKGSKDKSVVTELWKFEGKDRFARKRNRIADIAKRSKAVLGWASTAQFGTDNQFIKDDAARAASILEAARKDPVFVHIFDNATVQSATAWASALADYAAAHKSMPRPEILASCHQTLENCLIESTRNSMDATNKAMLESVAAEMMSVSDGVMRLPLFLAMILPVQLGAATADACTFIPVTRDQSDIYEVFNVAGSSFGSYAAGDVLDMQSVGVYSQLRRRYVLVASSDGTSKTATFKMEDFEGQNVPIRKGRTNIYVNRIKSVVDNGSGSLLHSFTNAAGEQITVTCSLNYNIGQIALSFSKAPDKGTEIAIETEINIEAAPELIPLINHEMKKYTLFPSQFVIAAEHTVQAAYEAQREFGLDLGSLQFRTLKEYLSHEQDMLRLRIMIWRTLATDTFDIALPVNQSFDVWATIIRGKFQTVYRDIIERVKSSGAMGMFAGADAASFFKQLPKDFFQPAEDYIQTPYVHYIGTPFRTTHST

SEQ ID NO: 13785 - protein, 948 aa, Homo sapiens
  DOMAIN (144)..(187): 1 kw MIND INHIBITOR DIVISION CONTROL domain identified by eMATRIX, accession number DM01756B, p-value=9.813e-09, raw score of 22.91
  DOMAIN (107)..(222): ParA family ATPase domain identified by PFam, accession name ParA, E-value=0.0062, PFam score of 0.3
ELHAYAMSIQNIIDIYEHRGVPKYRDRLAHAMRAHPHLLMEDLRILVIDLDPQSSATMFLSHKHSIGIVNATSAQAMLQNVSREELLEEFIVPSVVPGVDVMPASIDDAFIASDWRELCNEHLPGQNIHAVLKENVIDKLKSDYDFILVDSGPHLDAFLKNALASANILFTPLPPATVDFHSSLKYVARLHELVKLISNEGCECQLATTIGFMSKLSNKADHKYCHSLAKEVFGGDMLDVFLPRLDGFERCGESFDTVISANPATYVGSADALKNARIAAEDFAKAVFDQNVGLRVLVTDQEISVQEAQNLAKDVQTALQHSIREIGLRLMRMKNDGMSQKDIAAKEGLSQAKVTRALQAASAPEELVALFPVQSELTFSDYKTLCAVGDEMGYKNLEFDQLIQNISPEINDILSIEEMAEDEVKNKILRLITKEASLLTDKGSKDKSVVTELWKFEDKDRFARKGVKGRAFSYEFNRLSKKKSKLSNLREYQNRIADIAKRSKAVLGWASTAQFGTDNQFIKDDAARAASILEAARKDPVFAGISDNATAQIATAWASALADYAAAHKSMPRPEILASCHQTLENCLIESTRNSMDATNKAMLESVAAEMMSVSDGVMRLPLFLAMILPVQLGAATADACTFIPDTRDQSDIYEVFNVAGSSFGSYAAGDVLDMQSVGVYSQLRRRYVLVASSDGTSKTATFKMEDFEGQNVPIRKGRTNIYVNRIKSVVDNGSGSLLHSFTNAAGEQITVTCSLNYNIGQIALSFSKAPDKGTEIAIETEINIEAAPELIPLINHEMKKYTLFPSQFVIAAEHTVQAAYEAQREFGLDLGSLQFRTLKEYLSHEQDMLRLRIMIWRTLATDTFDIALPVNQSFDVWATIIRGKFQTVYRDIIERVKSSGAMGMFAGADAASFFKQLPKDFFQPAEDYIQTPYVHYIGTPFRTTHST

SEQ ID NO: 13786 - protein, 1412 aa, Homo sapiens
  DOMAIN (590)..(633): 1 kw MIND INHIBITOR DIVISION CONTROL domain identified by eMATRIX, accession number DM01756B, p-value=9.813e-09, raw score of 22.91
  DOMAIN (287)..(486): RepA family domain identified by PFam, accession name RepA, E -value=1.8e-128, PFam score of 440.2
MSFFSTLKTALSLKEKLAATGVLVLICALVGAGFAWERHQLKQAIEKIGSLDQAVKERDKSIMDLNQTIETMNKAEQHFHSQEVKNESEQAKYADRQMERKAEVQKQLVAAGNVRQRIPADTQRLLRESISEFNADADKGIFMSDKVTVKQTINKATSIYKIEQITVGKPGSEQYRRAFELADQLGLKHPDCIEHVFPTYADEQCTHVLTEEDFFSTEEREGVDRCIGVICSSVSDELFPNVPEYGGIGYQFLYEGDELKCYEHDIESKAKELTVNSNNTVQPVALMRLGVFVPKPSKSKGESKEIDATKAFSQLEIAKAEGYDDIKITGPRLDMDTDFKTWIGVIYAFSKYGLSSNTIQLSFQEFAKACGFPSKRLDAKLRLTIHESLGRLRNKGIAFKRGKDAKGGYQTGLLKKEAAQAIYTFIESLPQNPLPLSFARIRERLALQSAVGEQNRIIKKAIEQLKTIGYLDCSIEKKGRETHIFDTSDPSTAHNSMRLHQLIESEAWLPIEAGNHQNDSGYNLNNVSREELLEEFIVPSVVPGVDVMPASIDDAFIASDWRELCNEHLPGQNIHAVLKENVIDKLKSDYDFILVDSGPHLDAFLKNALASANILFTPLPPATVDFHSSLKYVARLPELKNRPTIGRTLNPSILSGFDSSSASGDRVEQVFKLSTGRQATFIEEVIPPNQVESDTFVDQHNNGRDQASLTPKSLKSIRSTIKHQQFYPAIGVRRATGKIEILDGSRRRASAILENVGLRVLVTDQEISVQEAQNLAKDVQTALQHSIREIGLRLMRMKNDGMSQKDIAAKEGLSQAKVTRALQAASAPEELVALFPVQSELTFSDYKTLCAVGDEMGYKNLEFDQLIQNISPEINDILSIEEMAEDEVKNKILRLITKEASLLTDKGSKDKSVVTELWKFEDKDRFARKRVKGRAFSYEFNRLSKEKSKLSNLREYQNRIADIAKRSKAVLGWASTAQFGTDNQFIKDDAARAASILEAARKDPVFAGISDNATAQIATAWASALADYAAAHKSMPRPEILASCHQTLENCLIESTRNSMDATNKAMLESVAAEMMSVSDGVMRLPLFLAMILPVQLGAATADACTFIPVTRDQSDIYEVFNVAGSSFGSYAAGDVLDMQSVGVYSQLRRRYVLVASSDGTSKTATFKMEDFEGQNVPIRKGRTNIYVNRIKSVVDNGSGSLLHSFTNAAGEQITVTCSLNYNIGQIALSFSKAPDKGTEIAIETEINIEAAPELIPLINHEMKKYTLFPSQFVIAAEHTVQAAYEAQREFGLDLGSLQFRTLKEYLSHEQDMLRLRIMIWRTLATDTFDIALPVNQSFDVWATIIRGKFQTVYRDIIERVKSSGAMGMFAGADAASFFKQLPKDFFQPAEDYIQTPYVHYIGTPFRTTHST

SEQ ID NO: 13787 - protein, 83 aa, Homo sapiens
SSAGWKKSFGNCLKKDAASAPANIPIAPEDLTRSIMSRYTVWNLPRMMVAHTSKDWLTGRAMSKVSVARVRQIMMRRRSISCS

SEQ ID NO: 13788 - protein, 70 aa, Homo sapiens
KKDAASAPANIPIAPEDLTRSIMSRYTVWNLPRMMVAHTSKDWLTGRAMSKVSVARVRQIMMRRRSISCS

SEQ ID NO: 13789 - protein, 364 aa, Homo sapiens
  DOMAIN (193)..(235): Osteopontin proteins domain identified by eMATRIX, accession number BL00884C, p-value=4.913e-40, raw score of 22.45
  DOMAIN (44)..(364): Osteopontin domain identified by PFam, accession name Osteopontin, E-value=6.4e-167, PFam score of 567.9
  misc_feature (1)...(364): Xaa = X or * as defined in Table 2
PGRPTRPPTRPGGGRAQHRLYQTLSQASCSLLSQTPTRGKLTTMRIAVICFCLLGITCAIPFKQADSGSSEEKHFYNKYPDAVATWLKPXPIFRRQNLLGPTEWLCPLKETNGLXTRRTLSKLRSNGKAMDHMDDMGXWKVDGWTMWDSQDSIDSNDSDDVDDTDDSHQSDESHHSDESDELVTGFSTDLPATEVFTPVVPTVDTYDGRGDSVVYGLRSKSKKFRRPDIKYPDATDEDITSHMESEELNGAYKAIPVAQDLNAPSDWDSRGKDSYETSQLDDQSAETHSHKQSRLYKRKANDESNEHSDVIDSQELSKVSREFHSHEFHSHEDMLVVDPKSKEEDKHLKFRISHELDSASSEVN

SEQ ID NO: 13790 - protein, 47 aa, Homo sapiens
EMPGHARCYADQQRYRFLPGSEVLPASINVAWRPVDNLNTCSTRSPE

SEQ ID NO: 13791 - protein, 83 aa, Homo sapiens; identical to SEQ ID NO: 13787

SEQ ID NO: 13792 - protein, 816 aa, Homo sapiens
  DOMAIN (91)..(118): Mrp family proteins domain identified by eMATRIX, accession number BL01215A, p-value=6.745e-09, raw score of 9.75
  DOMAIN (191)..(306): ParA family ATPase domain identified by PFam, accession name ParA, E-value=0.012, PFam score of -2.4
MLNVLTEQVQLQKDELHANEFYQVYAKAALAKLPLLTRANVDYAVSEMEEKGYVFDKRPAGSSMKYAMSIQNIIDIYEHRGVPKYRDRYSEAYVIFISNLKGGVSKTVSTVSLAHAMRAHPHLLMEDLRILVIDLDPQSSATMFLSHKHSIGIVNATSAQAMLQNVSREELLEEFIVPSVVPGVDVMPASIDDAFIASDWRELCNEHLPGQNIHAVLKENVIDKLKSDYDFILVDSGPHLDAFLKNALASANILFTPLPPATVDFHSSLKYVARLPELVKLISDEGCECQLATNIGFMSKLSNKADHKYCHSLAKEVFGGDMLDVFLPRLDGFERCGESFDTVISANPATKSKLSNLREYQNRIADIAKRSKAVLGWASTAQFGTDNQFIKDDAARAASILEAARKDPVFAGISDNATAQIATAWASALADYAAAHKSMPRPEILASCHQTLENCLIESNRNSMDPNNKAMLESVAAEMMSVSDGVMRLPLFLAMILPVQLGAATADACTFIPVTRDQSDIYEVFNVAGSSFGSYAAGDVLDMQSVGVYSQLRRRYVLVASSDGTSKTATFKMEDFEGQNVPIRKGRTNIYVNRIKSVVDNGSGSLLHSFTNAAGEQITVTCSLNYNIGQIALSFSKAPDKGTEIAIETEINIEAAPELIPLINHEMKKYTLFPSQFVIAAEHTVQAAYEAQREFGLDLGSLQFRTLKEYLSHEQDMLRLRIMIWRTLATDTFDIALPVNQSFDVWATIIRGKFQTVYRDIIERVKSSGAMGMFAGADAASFFKQLPKDFFQPAEDYIQTPYVHYIGTPFRTTHST

SEQ ID NO: 13793 - protein, 993 aa, Homo sapiens
  DOMAIN (229)..(272): 1 kw MIND INHIBITOR DIVISION CONTROL domain identified by eMATRIX, accession number DM01756B, p-value=9.813e-09, raw score of 22.91
  DOMAIN (330)..(418): ParB-like nuclease domain identified by PFam, accession name ParBc, E-value=5.8e-14, PFam score of 59.8
MLNVLTEQVQLQKDELHANEFYQVYAKAALAKLPLLTRANVDYAVSEMEEKGYVFDKRPAGSSMKYAMSIQNIIDIYEHRGVPKYRDRYSEAYVIFISNLKGGVSPTVSTVSLAHAMRAHPHLLMEDLRILVIDLDPQSSATMFLSHKHSIGIVNATSAQAMLQNVSREELLEEFIVPSVVPGVDVMPASIDDAFIASDWRELCNEHLPGQNIHAVLKENVIDKLKSDYDFILVDSGPHLDAFLKNALASANILFTPLPPATVDFHSSLKYVARLPELKNRPTIGRTLNPSILSGFDSSSASGDRVEQVFKLSTGRQATFIEEVIPPNQVESDTFVDQHNNGRDQASLTPKSLKSIRSTIKHQQFYPAIGVRRATGKIEILDGSRRRASAILENVGLRVLVTDQEISVQEAQNLAKDVQTALQHSIREIGLRLMRMKNDGMSQKDIAAKEGLSQAKVTRALQAASAPEELVALFPVQSELTFSDYKTLCAVGDEMGYKNLEFDQLIQNISPEINDILSIEEMAEDEVKNKILRLITKEASLLTDKGSKDKSVVTELWKFEDKDRFARKRVKGRAFSYEFNRLSKEKSKLSNLREYQNRIADIAKRSKAVLGWASTAQFGTDNQFIKDDAARAASILEAARKDPVFAGISDNATAQIATAWASALADYAAAHKSMPRPEILASCHQTLENCLIESTRNSMDATNKAMLESVAAEMMSVSDGVMRLPLFLAMILPVQLGAATADACTFIPVTRDQSDIYEVFNVAGSSFGSYAAGDVLDMQSVGVYSQLRRRYVLVASSDGTSKTATFKMEDFEGQNVPIRKGRTNIYVNRIKSVVDNGSGSLLHSFTNAAGEQITVTCSLNYNIGQIALSFSKAPDKGTEIAIETEINIEAAPELIPLINHEMKKYTLFPSQFVIAAEHTVQAAYEAQREFGLDLGSLQFRTLKEYLSHEQDMLRLRIMIWRTLATDTFDIALPVNQSFDVWATIIRGKFQTIY

SEQ ID NO: 13794 - protein, 1092 aa, Homo sapiens
  DOMAIN (91)..(118): Mrp family proteins domain identified by eMATRIX, accession number BL01215A, p-value=6.745e-09, raw score of 9.75
  DOMAIN (409)..(497): ParB-like nuclease domain identified by PFam, accession name ParBc, E-value=5.8e-14, PFam score of 59.8
MLNVLTEQVQLQKDELHANEFYQVYAKAALAKLPLLTRANVDYAVSEMEEKGYVFDKRPAGSSMKYAMSIQNIIDIYEHRGVPKYRDRYSEAYVIFISNLKGGVSKTVSTVSLAHAMRAHPHLLMEDLRILVIDLDPQSSATMFLSHKHSIGIVNATSAQAMLQNAMLQNVSREELLEEFIVPSVVPGVDVMPASIDDAFIASDWRELCNEHLPGQNIHAVLKENVIDKLKSDYDFILVDSGPHLDAFLKNALASANILFTPLPPATVDFHSSLKYVARLPELVKLISDEGCECQLATNIGFMSKLSNKADHKYCHSLAKEVFGGDMLDVFLPRLDGFERCGESFDTVISANPATYVGSADALKNARIAAEDFAKAVFDPSGDRVEQVFKLSTGRQATFIEEVIPPNQVESDTFVDQHNNGRDQASLTPKSLKSIRSTIKHQQFYPAIGVRRATGKIEILDGSRRRASAILENVGLRVLVTDQEISVQEAQNLAKDVQTALQHSIREIGLRLMRMKNDGMSQKDIAAKEGLSQAKVTRALQAASAPEELVALFPVQSELTFSDYKTLCAVGDEMGNKNLEFDQLIQNISPEINDILSIEEMAEDEVKNKILRLITKEASLLTDKGSKDKSVVTELWKFEDKDRFARKRVKGRAFSYEFNRLSKEKSKLSNLREYQNRIADIAKRSKAVLGWASTAQFGTDNQFIKDDAARAASILEAARKDPVFAGISDNATAQIATAWASALADYAAAHKSMPRPEILASCHQTLENCLIESTRNSMDATNKAMLESVAAEALMMSVSDGVMRLPLFLAMILPVQLGAATADACTFIPVTRDQSDIYEVFNVAGSSFGSYAAGDVLDMQSVGVYSQLRRRYVLVASSDGTSKTATFKMEDFEGQNVPIRKGRTNIYVNRIKSVVDNGSGSLLHSFTNPAGEQITVTCSLNYNIGQIALSFSKAPDKGTEIAIETEINIEAAPELIPLINHEMKKYTLFPRKLWGLCIMIWRTLATDTFDIALPVNQSFDVWATIIRGKFQTVYRDIIERVKSSGAMGMFAGADAASFFKQLPKDFFQPAEDYIQTPYVHYIGTPFRTTHST

SEQ ID NO: 13795 - protein, 626 aa, Homo sapiens
  misc_feature (1)...(626): Xaa = X or * as defined in Table 2
MTKCSHLCNNYLFSWLRDNGILIATGERRNVRKQEYISRGYFTLKETVIDTSNGSRISFTTRITGKGQQWLMKRLLDADVVRTTSIVMLAKVTFLSCITMSDFTFSGYELACFVTHSGLSRSAGHILSQCANLAATTSEYFIHKPHRLITAETGYSQSTVVRAFREAVNKGILSVEIVIGDHRERRANLYRFTPSFLAFAQQAKNALIESKLKISSAATKVKAVLAKTLALFNFLSTPPCQNDTPSPCQDDVAIKNKKSQVKKTKRSVSGGAGTTSLKKLTSWIAKAKAKADNLRLSKKRTQKHEFKQKVEAAARKYAYLKNKRSPDIGGISNFDNLPHCMTVNEALNAVLAKNKDNEQWGAVAGAYIADITDGEDRARHFGLMSACFGVGSGVYMQTRYRGKLVSQGFVVQMILTPRDADGTFITSTDSETVHYHYGPKDLVTILFYIFITIILHAVVQEYILDKISKRLHLSKVKHSKFNESGQLVVFHFTSVIWCFYVVVTTPQALTRVLNCLLALGSNAAVMGECGFAQLQQTWASALADYAAAHKSMPRPEILASCHQTLENCLIESTRNSMDATNKADAGICRSRDDERFXRCYASAFIPRDDPACSVGGSYRXCVITEF

SEQ ID NO: 13796 - protein, 1145 aa, Homo sapiens
  DOMAIN (91)..(118): Mrp family proteins domain identified by eMATRIX, accession number BL01215A, p-value=6.745e-09, raw score of 9.75
  DOMAIN (416)..(504): ParB-like nuclease domain identified by PFam, accession name ParBc, E-value=4.1e-12, PFam score of 53.7
MLNVLTEQVQLQKDELHANEFYQVYAKAALAKLPLLTRANVDYAVSEMEEKGYVFDKRPAGSSMKYAMSIQNIIDIYEHRGVPKYRDRYSEAYVIFISNLKGGVSKTVSTVSLAHAMRAHPHLLMEDLRILVIDLDPQSSATMFLSHKHSIGIVNATSAQAMLQNAMLQNVSREELLEEFIVPSVVPGVDVMPASIDDAFIASDWRELCNEHLPGQNIHAVLKENVIDKLKSDYDFILVDSGPHLDAFLKNALASANILFTPLPPATVDFHSSLKYVARLPELVKLISDEGCECQLATNIGFMSKLSNKADHKYCHSLAKEVFGGDMLDVFLPRLDGFERCGESFDTVISANPATYVGSADALKNARIAAEDFAKAVFDPDLIVLQPLAIESRRYSSYQLVARPHLLKRVIPPNQVESDTFVDQHNNGRVQASLTPKSLKSIRSTIKHQQFYPAIGVRRATGKIEILDGSRRRASAILENVGLRVLVTDQEISVQEAQNLAKDVQTALQHSIREIGLRLMRMKNDGMSQKDIAAKEGLSQAKVTRALQAASAPEELVALFPVQSELTFSDYKTLCAVGDEMGNKNLEFDQLIQNISPEINDILSIEEMAEDEVKNKILRLITKEASLLTDKGSKDKSVVTELWKFEDKDRFARKRVKGRAFSYEFNRLSKEKSKLSNLREYQNRIADIAKRSKAVLGWASTAQFGTDNQFIKDDAARAASILEAARKDPVFAGISDNATAQIATAWASALADYAAAHKSMPRPEILASCHQTLENCLIESTRNSMDATNKAMLESVAAEMMSVSDAEMMSVSDGVMRLPLFLAMILPVQLGAATADACTFIPVTRDQSDIYEVFNVAGSSFGSYAAGDVLDMQSVGVYSQLRRRYVLVASSDGTSKTATFKMEDFEGQNVPIRKGRTNIYVNRIKSVVDNGSGSLLHSFTNAAGEQITVTCSLNYNIGQIALSFSKAPDKGTEIAIETEINIEAAPELIPLINHEMKKYTLFPSQFVIAAEHTVQAAYEAQREFGLDLGSLQFRTLKEYLSHEQDMLRLRIMIWRTLATDTFDIALPVNQSFDVWATIIRGKFQTVYRDIIERVKSSGAMGMFAGADAASFFKQLPKDFFQPAEDYIQTPYVHYIGTPFRTTHST

SEQ ID NO: 13797 - protein, 83 aa, Homo sapiens
  DOMAIN (91)..(83): Mrp family proteins domain identified by eMATRIX, accession number BL01215A, p-value=6.745e-09, raw score of 9.75
  DOMAIN (191)..(83): ParA family ATPase domain identified by PFam, accession name ParA, E-value=0.012, PFam score of -2.4
  misc_feature (1)...(83): Xaa = X or * as defined in Table 2
MSDWSRVTGMKVHASAVAAPNXTGRIIARNKGRRITPSETLIISAATDSSIALLVASMLLRVDSLSIAISVPLSGALENDRAI

SEQ ID NO: 13798 - protein, 41 aa, Homo sapiens
  misc_feature (1)...(41): Xaa = X or * as defined in Table 2
LFHPCQDSQQHHXCVCCRLTGHGAAXVHGPCQAVQTYRASH

SEQ ID NO: 13799 - protein, 107 aa, Homo sapiens
GVGAGGCLREAAAGHVTGRAPHGRRPSSARPERPARPRPWGAATAARNEDSDQDRRGAEAVCLDPSQPPPTKALNGAEPNYHSLPSARTDEQALLFFHPCQDSQQHH

SEQ ID NO: 13800 - protein, 87 aa, Homo sapiens
  misc_feature (1)...(87): Xaa = X or * as defined in Table 2
TINPKLLKNHARGTPEVPNQKHHWSPKQKPLLTKNPKNNLPRWPVPIIPPFPEEKPRKFPXTPKRRIPXTKIGPLPSNPGYPTKPPF

SEQ ID NO: 13801 - protein, 30 aa, Homo sapiens
WRDLGSPQPPPPGFKRFFCLILPTRCRSPR

SEQ ID NO: 13802 - protein, 153 aa, Homo sapiens
YVKVREMGLASKKWNLISMFYGNSDLMGSKLVHISRNYFIFSRQSFTLVGQAGVQWRDLGSPQPLLPGFKRFSCLSLPSSWDYRHTPPHPANFVFLVETGFLHVGQAGLELPTSGDLPASASQSPGITGVSHCTWPIPSHLLKKKIKKINIHL

SEQ ID NO: 13803 - protein, 107 aa, Homo sapiens
  DOMAIN (15)..(35): ACTIN SIGNATURE domain identified by eMATRIX, accession number PR00190F, p-value=1.321e-24, raw score of 7.80
  DOMAIN (1)..(107): Actin domain identified by PFam, accession name actin, E- value=2.3e-72, PFam score of 238.7
TFNVPAMYVAIQAVLSLYASGRTTGIVLDSGDGVTTMYPGIADRMQKEITALAPSTMKIKIIAPPERKYSVWIGGSILASLSTFQQMWITKQEYDEAGPSIVHRKCF

SEQ ID NO: 13804 - protein, 56 aa, Homo sapiens
  DOMAIN (7)..(56): Actins proteins domain identified by eMATRIX, accession number BL00406E, p-value=1.000e-40, raw score of 8.44
  DOMAIN (1)..(56): Actin domain identified by PFam, accession name actin, E- value=1.1e-40, PFam score of 134.8
LAPSTMKIKIIAPPERKYSVWIGGSILASLSTFQQMWISKQEYDESGPSIVHRKCF

SEQ ID NO: 13805 - protein, 354 aa, Homo sapiens
  DOMAIN (85)..(140): Actins proteins domain identified by eMATRIX, accession number BL00406B, p-value=1.000e-40, raw score of 5.47
  DOMAIN (1)..(294): Actin domain identified by PFam, accession name actin, E- value=6.5e-192, PFam score of 631.0
MCDEDETTALVCDNGSGLVKAGFAGDDAPRAVFPSIVGRPRHQGVMVGMGQKDSYVGDEAQSKRGILTLKYPIEHGIITNWDDMEKIWHHTFYNELRVAPEEHPTLLTEAPLNPKANREKMTQIMFETFNVPAMYVAIQAVLSLYASGRTTGIVLDSGDGVTHNVPIYEGYALPHAIMRLDLAGRDLTDYLMKILTERGYSFVTTAEREIVRDIKEKLCYVALDFENEMATGRHPSILPWKRATSCQTGQVITIGNERFRCPETFFQPSFIGMEVGGHFTRPPYNSIMKCDIDIQEGPCMPTNVMFGGHPRLYPWEFADPHARKRFTGAGTPGTHEESKDKDSFAPRRSGKILG

SEQ ID NO: 13806 - protein, 102 aa, Homo sapiens
  DOMAIN (41)..(53): THIOREDOXIN FAMILY SIGNATURE domain identified by eMATRIX, accession number PR00421C, p-value=5.286e-10, raw score of 13.60
  DOMAIN (42)..(83): Thioredoxin domain identified by PFam, accession name thiored, E-value=9.7e-05, PFam score of 20.1
  misc_feature (1)...(102): Xaa = X or * as defined in Table 2
LRPWCGHLRTXAQYHTLRAARLDPNFAIAXMEAKATDGPPPFEVRGFPTIYFSPANNRLHPRTSEGGRDLSDFISYLHVEATNPPVIQEVXPKKKKKAQEDL

SEQ ID NO: 13807 - protein, 194 aa, Homo sapiens
  DOMAIN (72)..(85): Thioredoxin family proteins domain identified by eMATRIX, accession number BL00194, p-value=3.813e-15, raw score of 12.16
  DOMAIN (49)..(127): Thioredoxin domain identified by PFam, accession name thiored, E-value=1.7e-33, PFam score of 115.4
  misc_feature (1)...(194): Xaa = X or * as defined in Table 2
AIRTAKGEKFVMQEEFSRDGKALERFLQDYFDGNLKRYLKSEPIPESNDGPVKVVVAENFDEIVNNENKDVLIEFYAPWCGHCKNLEPKYKELGEKLSKDPNIVIAKMDATANNVHSPYEVRGFPSHILLSKPNKKLNPKKYEGGRELRXFLLAIYQREATKPPPVIQVXFIPKYRRRRHQEDLLKPVAQTPTL

SEQ ID NO: 13808 - protein, 43 aa, Homo sapiens
YDKPHVLVDILVDDSGKESLIGYRPTEDYDLRNCILVGINQME

SEQ ID NO: 13809 - protein, 31 aa, Homo sapiens
SVLSKPKVKMPHILFTLSCTVSHSIWLIPIM

SEQ ID NO: 13810 - protein, 525 aa, Homo sapiens
GRGWRAVLGWSRRRSGLEPATVGSSMALLFLLPLVMHGVSRAEMGTADLGPSSVPTPTNVTIESYNMNPIVYWEYQIMPQVPVFTVEVKNYGVKNSEWIDACINISHHYCNISDHVGDPSNSLWVRVKARVGQKESAYAKSEEFAVCRDGKIGPPKLDIRKEEKQIMIDIFHPSVFVNGDEQEVDYDPETTCYIRVYNVYVRMNGSEIQYKILTQKEDDCDEIQCQLAIPVSSLNSQYCVSAEGVLHVWGVTTEKSKEVCITIFNSSIKGSLWIPVVAALLLFLVLSLVFICFYIKKINPLKEKSIILPKSLISVVRSATLETKPESKYVSLITSYQPFSLEKEVVCEEPLSPATVPGMHTEDNPGKVEHTEELSSITEVVTTEENIPDVVPGSHLTPIERESSSPLSSNQSEPGSIALNSYHSRNCSESDHSRNGFDTDSSCLESHSSLSDSEFPPNNKGEIKTEGQELITVIKSPPPSFCYDKPHVLVDLLVDDSGKESLIGYRPTEDSQRNFHEISLSCTQL

SEQ ID NO: 13811 - protein, 70 aa, Homo sapiens
  misc_feature (1)...(70): Xaa = X or * as defined in Table 2
EQQQLQAQHLSHGHGPPVPLTPHPSGLQPPGIPPLGGSAGLLALSSALSGQSHLAIKDDKKHHDAEHHRX

SEQ ID NO: 13812 - protein, 150 aa, Homo sapiens
  misc_feature (1)...(150): Xaa = X or * as defined in Table 2
PLGCASSQSISASRNTLCTTASSCCPQVLAHSKAAEYMTRWKVQQMPHSQDRALQSVFCAPFHSXXLVALPTGHRXMTPAQFSECFQATSGGSDXDPFLAPSFLVPGLPVAPGLLLPLGPVHSRATMEEGQATHEELTVFIGLRPGVRGS

SEQ ID NO: 13813 - protein, 455 aa, Homo sapiens
  DOMAIN (81)..(126): TEA domain proteins domain identified by eMATRIX, accession number BL00554A, p-value=1.000e-40, raw score of 11.66
  DOMAIN (21)..(448): TEA domain identified by PFam, accession name TEA, E-value=3e -246, PFam score of 831.5
RTHPTFPHPGTGPTSAPPSGALEGTAGTITSNEWSSPTSPEGSTASGGSQALDKPIDNDGEGVWSPDIEQSFQEALAIYPPCGRRKIILSDEGKMYGRNELIARYIKLRTGKTRTRKQVSSHIQVLARRKAREIQAKLKDQAAKDKALQSMAAMSSAQIISATAFHSSMRLARGPGRPAVSGFWQGALPGQAETSHDVKPFSQQTYAVQPPLPLPGFESPAGPAPSPSAPPAPPWQGRSVASSKLWMLEFSAFLEQQQDPDTYNKHLFVHIGQSSPSYLRPYLEAVDIRQIYDKFPEKKGGLKDLFERGPSNAFFLVKFWADLNTNIEDEGSSFYGVSSQYESPENMIITCSTKVCSFGKQVVEKVETEYARYENGHYSYRIHRSPLCEYMINFIHKLKHLPEKYMMNSVLENFTILQVVTNRDTQETLLCIAYVFEVSASEHGAQHHIYRLVKE

SEQ ID NO: 13814 - protein, 430 aa, Homo sapiens
  DOMAIN (62)..(77): TEA DOMAIN SIGNATURE domain identified by eMATRIX, accession number PR00065B, p-value=6.333e-19, raw score of 8.72
  DOMAIN (1)..(404): TEA domain identified by PFam, accession name TEA, E-value= 2.6e-61, PFam score of 217.1
MPAAACRQDKKSGRFYSFTEAEGTVAVTQGKAEGRAAPWSLPSVKKAQEKVWGEERRPPALGRNELIARYIKLRTGKTRTRKQVGLKRRVGVPGVVPQHQSAPKVSSHIQVLARRKAREIQAKLKDQAAKDKALQSMAAMSSAQIISATAFHSSMALARGPGRPAVSGFWQGALPGQAGTSHDVKPFSQQTYAVQPPLPLPGFESPAGPAPSPSAPPAPPWQGRSVASSKLWMLEFSAFLEQQQDPDTYNKHLFVHIGQSSPSYSDPYLEAVDIRQIYDKFPEKKGGLKDLFERGPSNAFFLVKFWVRGREGTSQRQKAGPGLEAKTQAYQLIPPQKPPPAEPERTLAVGHPTCRFVGEENGLKKPIDLPKFPQQLQSRKASWRRKYLSHPREKDSCRSEGHAHIMRDWVSELRVTRRPGKTAEVQVLLL

SEQ ID NO: 13815 - protein, 148 aa, Homo sapiens
  misc_feature (1)...(148): Xaa = X or * as defined in Table 2
SNNRTDNPTSVAYLSKETDVVAKGWPHCLWVVVAVAILVLEAIKIIQGKDFTVWTSHDVNGILGAKGNSWLSDKRLLRYQALLLEGPVLQIHTCVALNPAIFLPEDGEPIKHDYQQIVAQTYVTXEDLLEVPLANPDLNLYTNGSSFV

SEQ ID NO: 13816 - protein, 470 aa, Homo sapiens
METPGKAFRQIDRKTSAASWFSFPRTSVTGLRGGGDKMKGALGDPSAPPVPANLRLANSTVNSDGSVTVTIVWGLPEEPDILVHHYNVFWSWTISSKSLVPTKKKQRKTTDGDWQAAPPATGCRIHWVKPAVLLSLVGTWRTFMSSQGIVNTPVSTLHLAQVRPRTHQFWTDFGDHEGTITNRQASSGTKYQAPVGQLKATSMAAGLKTQVSCFLGKGSLMTPGLFGVGTVGGQARVQVFKNVSVSAAKSDLPWSSIWSGRKTSVSAAASLLGGGEFGPTRIHIPFSLSDLKQIKAGLGRFSDDPDRDQEEQAQKEKRDQRKAAALVMALRQTNLGGSERTENGAGQSPERAGIALGDLIQTRGKTPQPVAYLSKEIDAVAKVWPHCLKLVAAVAVFVSEAIKIIQGKDLTVWTTHEEPVGSSAQQSQHQPDQPRYTCKLLEDLHLLFRKEISQTKKAPILFDPVIKREK

SEQ ID NO: 13817 - protein, 81 aa, Homo sapiens
LDTECPHKGSPSPHQSRGPTLGGRRDGGKMAAETGYWRCLPESRTCAEEAVHLWPAVLRDPRWGNPGDGAWPCYMRGPRLE

SEQ ID NO: 13818 - protein, 118 aa, Homo sapiens
  DOMAIN (34)..(46): RNase H domain identified by eMATRIX, accession number PF00075C, p-value=9.786e-11, raw score of 11.58
SWPSDKQTLVVQRGQKMEQANHPDPTDHMSQLMWTVLPQGFRDSPHLFGQALAQDLGHFSSPGTLVLQYVDDLLLATSSEASCQQATLALLNFLANQGYKLSRSKAQLCLQQVKYLCL

SEQ ID NO: 13819 - protein, 188 aa, Homo sapiens
KKTSKEISKGPQKPPGYRLRPLQAVGGGEFGPTQVHVHFSLSDLKQIKVDLGKISDDPDRYIDVLQGLGQTLDLSWRDVMLLLDQTLAFNEKNAALAAAQEFGDTWYLSEVNDRMTAEERDKFPTEDGEPIKCDCQQIIVQTYAAQDDILEVPLANPDLNLYTDGSSFVENGIRRAGYAIVSDVTILE

SEQ ID NO: 13820 - protein, 123 aa, Homo sapiens
  misc_feature (1)...(123): Xaa = X or * as defined in Table 2
CNNSMTSLQVRLKVCPRPCRTSMLPIRIIXKLPQVCLDLLXIREGEWDMYPCWAKFPCPYSLKGTXPIAWGILWSFGDFFAYIPLMQQQKHXFSSQNTRRNEEGQIXWPLLMHSQKPAPLPVV

SEQ ID NO: 13821 - protein, 114 aa, Homo sapiens
  DOMAIN (17)..(29): RNase H domain identified by eMATRIX, accession number PF00075C, p-value=3.077e-09, raw score of 11.58
FLFAFEDLTDHTSQLTWTILPQGFRDSPHLFGQALAQDLGHFSSPGTLVLQYVDDLLLATSSEASCQQATLDFLSFLANQGYEASRSKAQLCLQQDRGYQATDDLTNGTPNELN

SEQ ID NO: 13822 - protein, 215 aa, Homo sapiens
  misc_feature (1)...(215): Xaa = X or * as defined in Table 2
LSRVLEFEEFQFLQAQYHSLKLECEILASEKTEMHRHYVMYYEMSYGLNIEMHKQTEIAKRLNTICAQVIPFLSQEHQQQVAQAVERAIQVTMAELNAIIGVRGLPGLPPTQQQLQAQHLSHGHGPPVPLTPYPSGLQPPGIPPLGGSAGLLALTSALDGQSHLAIKDDKKHHDAXHHRGDRPGKPDXDFVLILLQCCKVVCIAKESPNLYREQT

SEQ ID NO: 13823 - protein, 55 aa, Homo sapiens
  misc_feature (1)...(55): Xaa = X or * as defined in Table 2
LGNKHLLGSIDPRGSWVTGEYIFLRPPIAAXGRQXDFLPFPELWWTSLNNSWAFS

SEQ ID NO: 13824 - protein, 463 aa, Homo sapiens
  misc_feature (1)...(463): Xaa = X or * as defined in Table 2
ASHPLRGLLCGPSLPNEPCPLLHGTQSHRPLKGXGVRAHSTGLAGSSTCRPLRDPLGEASWAPESAQGLXIHQSALCIXLKLKPAGQRAKLGDRLDIPDRRKSSTILGRAGDLQPAMPEPPTLSVGSCAAQASPMNPAPCSTAPSPIDHSRAEECGRIARDWQAAPPAGPCGIHWVKPAGLLSLLRDCKYTNRHSVSSSRFANTNQHPASSSGFVNAPIDTLYLANLVGTWRTFVASSGIVNAPISTLSKQTTWLYQSAGCGKESTQASGAQTGGTSFKSLETTGSISEASSAKHCTELFSRFTTFNPDSVPSDGVVGDTAGTVWPGVLKGEPCHLGTCYRCVLDPHPTPSESDTIQGIHVQVCYMSTLHDADVCDTNDPVTHNTKKYIYSTEIFTSNNPELRSEDETVFRALEKWKTSEQTIGEMDFYICNDPHPDSALYQNGLSKMQDTVSLSVFSPSVAA

SEQ ID NO: 13825 - protein, 84 aa, Homo sapiens
  DOMAIN (13)..(43): PHOTOSYSTEM II PROTEIN PRECURSOR PHOTOSYNTHESIS domain identified by eMATRIX, accession number PD02346B, p-value=1.808e- 10, raw score of 20.57
  DOMAIN (51)..(84): Gag P30 core shell protein domain identified by PFam, accession name Gag_p30, E-value=0.0012, PFam score of 16.2
  misc_feature (1)...(84): Xaa = X or * as defined in Table 2
QLKKGTNSLLVSKPSPVWIPTGTLTQIMGTGVANICXPVFXKDXGELGKMNYAMMSTITQGKEENPAFLKWLWEALRKYTPLSP

SEQ ID NO: 13826 - protein, 544 aa, Homo sapiens
  DOMAIN (454)..(465): RNase H domain identified by eMATRIX, accession number PF00075B, p-value=1.000e-13, raw score of 12.56
  DOMAIN (44)..(262): Gag P30 core shell protein domain identified by PFam, accession name Gag_p30, E-value=2.8e-28, PFam score of 102.6
MVCPEFVPSDVRMCPEFLPSVGFVVSLTSGVKLQTFTLDTKVLHVPFSLSDLKQIKADLGKFSDDPDRYKDVLQGLGQTFDLAWRDVMLLLDQILAFIEKNAALAAAREFGDTWYLSQVNDRMTAKERDKFLTGQQAIPTMDPHWDFDSDHGDWSHKHLLTCVLEGLKGIRKKPMNYSMMSTITQGQEEKPSAFLERLREALRKYTPLSPESLEGQLILKDKFITQSAADIRRQLQKQALGPEQNLQELLNLATLVFYNRDQEEQAQKEKRDQRKAAALVRALRQTNLGGSERTEYGAGQSPRRDILAKAGAIIYMNMGNKLPICCPLLEEGINPEVWALERQFGRAKNARPVQIRLKDPTTFPYQRQYPLRLEAHKALQDIVKHLKPQGLVRKCSSPCNTPVLGVQKPNGQWRLVQDLRLINEAVIPVYLVVANPYTLLSQIPEEAEWFMVLDLKDAFFCIPLHSGSQFLFAFEDPTDHMSQLMWMVLPQGFRDSPHLFGEALAQDLGHFSSPGTLVLQYMDDLLLATSWEASCQQATLELSS

SEQ ID NO: 13827 - protein, 79 aa, Homo sapiens
DENIHPLNPLSKQDTPTAVGNWTMTAVATSCWIGVKKGPCSCSILQRGALGREFVPFFSCHSIIYLTKIPGISKLLGCS

SEQ ID NO: 13828 - protein, 383 aa, Homo sapiens
MDGTGDHYVKRKKPDTERQTSHLLTSLWDLKIKTIELVEIESRRMATKAWEGPAMEHTCHLASSYQTSVETALGHPIEEEAAEAEPKQNSGINVVLAVISELLRLPPVSIIQSNEARVAGPHDQNHHSFCSRGHLWPLYSGGNWGLLFGLSELKSIPWEKLSHVYMSRGLSQGPMGDERYMREKRQGCSKGSEEMGASYSGGDFENLCVGTLYLANLVGTWRTFASSSGIVNAPISILSKRTNQLSVKWTNQLSVKWTNQQDSTLPLRAATLTAKVCSFTPEARETTNPPGGMSNSRRAALRVVTLTVKVCSFIPEPVRPGTHQKEETLNTSEHQKEQTLDTPPLRTVTLTPRVHGFILEVSETKNPPIPDTPALWEAEAGGS

SEQ ID NO: 13829 - protein, 96 aa, Homo sapiens
  misc_feature (1)...(96): Xaa = X or * as defined in Table 2
GDICHHLGLTPVGSHSLLSCSRXQVAXVGAVTAATIGTGILLQQLAFLVCNWLLLSGSSENFPRSALICFKSEREKGTCIQVGPNSPPPTACKGHN

SEQ ID NO: 13830 - protein, 811 aa, Homo sapiens
  DOMAIN (21)..(125): Gag P30 core shell protein domain identified by PFam, accession name Gag_p30, E-value=5.3e-19, PFam score of 70.1
MPQVDHLVFVVHGIGPVCDLRFRSIIECGLRRIRKKPMNYSMMSTITQRKEENPSVFLEWLWEALRKYTPLSPDSLEGQLILKDKFITQSATDISRKLQNRALVPEQNLEVLLNLATLVFYTRDQEEQAKKEKRDQRKAAALVMALKQTNLGGSERTENGAGQSPGMAFYQCGLQGHLRKDCPTRNKLPPRPCPLCRGNHWKATAPEDKEDGEPIKHDCQQIIVQSYAPQEDRLEVPLANPDLNLYTDGSSFVENGIRRAGYAIVSDVTILEMRKCAGQERDRFPVSGVVPGTRRRVSDGGPQPWPRENLTVAAAAPPLPHRALTYFSPPRPRSSASMCPSSQSPRPPLLRPPCSYRELSRVLDIHSYPGIPQIFAEYPLLVRQVLAGNANKLNSGPLLGYSSLSPTRRLLGYEDSTDVGEEDSFLGQTSIHTSAPQTFSYFSQVSSSSDPFGNIGQSPLTTAATSVGQSGFPKPLTALPFTTGSQDVSNAFSPSISKAQPGAPPSSLMGINSYLPSQPSSLPPSYFGNQPQGIPQPGYNPYRHTPGSSRANPYIAPPQLQQCQTPGPPAHPPPSGPPVQMYQMPPGSLPPVPSSVQSPAQQQVPARPGAPSVQVPSPFLLQNQYEPVQPHWFYCKEVEYKQLWMPFSVFDSLNLEEIYNSVQPDPESVVLGTDGGRYDVYLYDRIRKAAYWEEEPAEVRRCTWFYKGDTDSRFIPYTEEFSEKLEVPSLNEVPLHYLKPNSFVKFRCMIQDMFDPEFYMGVYETVNQNTKAHPQQELDLNSPRNTTLERQTFYCVPVPGESTWVKEISFI

SEQ ID NO: 13831 - protein, 322 aa, Homo sapiens
  DOMAIN (112)..(123): RNase H domain identified by eMATRIX, accession number PF00075B, p-value=1.000e-13, raw score of 12.56
  DOMAIN (45)..(233): Reverse transcriptase domain identified by PFam, accession name rvt, E-value=2.7e-29, PFam score of 110.7
MHAVHTSLLVERTILTTTKERGSTLQYPLRPGAHKGLQDIVKRFKAQALIRKCSSPCNTPILGVQKPNGQWRLVQDLRLINEAVIPLYPVVPNPYNLLSQIPEEAEWFTVLDLKDAFFCIPLHSDSQFLFAFEDPTDHTSQLTWTVLPPGFRDSPPLFGQALAQDLGHFSSPGTLVLQYVDDLLLATSSEASCQQATLDLLNFLANQGYKTHSRDSDAPVGFTDRHLVATEKIPRGREPLSSLAVYTRGRPTRTGARRTIVSRIRRDFRFFYRYLAQREPPLYQQSLLIHLQLDSQPALSVVIGKVPNVVELTPNFGTAAQV

SEQ ID NO: 13832 - protein, 801 aa, Homo sapiens
  DOMAIN (486)..(503): RNase H domain identified by eMATRIX, accession number PF00075A, p-value=3.160e-12, raw score of 14.44
  DOMAIN (470)..(698): Reverse transcriptase domain identified by PFam, accession name rvt, E-value=1.2e-24, PFam score of 95.3
MSMGFLVEESEPVVWRGLMVMSAIEKLLRQVSGYLLAQGVSRNVVHEPGVGSSQVCSVPCPTVAKLNSGAKYRAPVGQLKATSAATRLKTRVSGFLGRGSLTSPDSLELGALVCLEPASTFPVLLGRAKGRQRGKPFSSGVRTTRGPISLPPYPSLPIAPRPINDNPPLISPAQKEICEEISKGQQKPLGYRLCPLQAVGGGEFGPTWVHVPFSLSDLKQIKADLGNFSDDPDRYINVLQGLGQIFYLIWRDVMLLLDQTLAFNEKNAALAAAQEFGDTWYLSQVNDRMTAEERGKIPNGQQAVPSMDPHWDLDSDHGDCSCKHLLTCVLEGLRRIRKKDQEEQAQKEKQDQRKTAALVMALRQTNFGGSERTENGAGQSPERDTLAKAGAIIYMNMGNKLPICCPLPEEGINPEVWALEGQFGKAKNAHPVQIRLKDPTTFPYQRQYPLRPEAHKGLKDIVKYLKAQALVKKCSSPCNSPILGVQKPNSQWRLVQDLRLINEAVIPLYPVVPNPYILLSQIPEEAEWFTVLDLKDAFFCIPPHSDSQFLFAFEDPTDHMSQLMWTVLPQGFKDSPHLFGQALAQDLGYFSSPGTLVLQYVDDLLLATSSEASCQQATLDLLNFLANQGYKRLLTMDPRTQRDSQAPLYSNQGENQRDKKSKKEVQREEETDKEGVRKRERERQRRSQRERKRDGTSVSTLAVLEEPFSLPMRYGGPYLGLAKTRADSLCLWGGVEGEARVGAGASCSTRRPVRVPGEHRLGRPCTGHGQPAPAGLDRGMCSFWAARVPGLGGAKSHGDCH

SEQ ID NO: 13833 - protein, 192 aa, Homo sapiens
  misc_feature (1)...(192): Xaa = X or * as defined in Table 2
GLYFGKVGEVIEQVKAFDELKALIAFFPLSSLSFLAPFVCLLNLLFCFRLPLLSCLFSPGCRLHRHHCHHYLLLLLLFLSHHHHQQQQQLQAQHLSHGHGPPVPLTPHPSGLQPPGIPPLGGSAGLLALSSALSGQSHLAIKDDKKHHDAEHHRGERPGKPDXDFVLILLQCCKVVCIAKESPNLYREQTMR

SEQ ID NO: 13834 - protein, 946 aa, Homo sapiens
  DOMAIN (281)..(292): RNase H domain identified by eMATRIX, accession number PF00075B, p-value=1.000e-13, raw score of 12.56
  DOMAIN (214)..(403): Reverse transcriptase domain identified by PFam, accession name rvt, E-value=2.5e-30, PFam score of 114.2
MSGTLKGMLPKRDLPIYPIYPDLCPLGPNACETNFLSPLFSEKEISKEISKGPQKPLGYRLCPLQAIGAGEFGPTRVHVPFSLSDLKQIKADLGKFSDDPDRHIDVLQGLGQTFDLAWRDVMLLLDQTLAFYEKNVALAAAREFGDTWYLSQVCLTIEGQEIDFLLDSGTAFSVLISCPGQLSSRSVTIRGILGQPVTRPEAHKGLQNTVKHLKAQGLVRKCSSPGNTPILGVQKPNRQCRLVQDLRLINEAVIPLYPVVPNPYTLLSQIPEEAEWFMVLDLKDAFFCIPLHSDSQFLFAFEDPTDHTSQLMWMVLPQGFRDSPHLFGQALARDLGHFSSLGTLVLQYVDDLLLATSSEALCQQATLDLLNFLANQGYKVSRSKAQLCLQQDGEPIEHDCQQIIVQTYATRDDLLDVPLTIPDLNLYTDGSSVVENGIQRTGYTIVSDVTILESPVAAILLLLAFGACIFNLLVKFVSSRIEAFELQMVLQMEPQMSSTNNFYRGPMDRPAGTSPGLESSPLKDTTTAGAVTLTTEVCSFTPEPARPRTHQKEETPNTSEHQKEQTPDTLPLRTVTLTASVHGFILEVSFDQEPTNSRHILVTTKGPLIIAKWRKTNVSAAVLVSSTILISRVQGLLQVLGQGCFCCCIGERNYSNQQGPGTIAGSWAGVVSTAASNATLAAAPKFGDTWYLSQVNDRMTAEERDKFPTGQQAIPSMDLHWDLNSDHGDWSRKHLLSCVLEGLRRIRKKAMNYSMLSTVTQGKEKNPSAFLEQLWGALRKYTPLSPKSLEGQLILKDKFITQSAADIRRKLQKQALGPEQNLEALLNLATSVFYNRDQEEQAQKEKRDQRKAAALVMALRQTNLGGSERTENGAGQSPERAGIALGDLIQTRGKTPQPVAYLSKEIDAVAKVWPHCLKLVAAVAVFVSEAIKIIQGKDLTVWTTHE

SEQ ID NO: 13835 - protein, 930 aa, Homo sapiens
  DOMAIN (35)..(47): PEPSIN (A1) ASPARTIC PROTEASE FAMILY SIGNATURE domain identified by eMATRIX, accession number PR00792C, p-value=1.931e- 09, raw score of 9.10
  DOMAIN (18)..(115): Retroviral aspartyl protease domain identified by PFam, accession name rvp, E-value=1.7e-15, PFam score of 60.2
SNDRTEDDCGKHPFMSSPPTEPWVCLIIEGQEIDFLLDTGTTFSVLIPCLGRLSSRSVTIQGILGQPVTRYFSHLLSCNWETLLFSHAFLVMPESPTPLLGRDILAKAGAIISMKTGNKLPICCPLLEGINPEVWALEGQFGRAKNAHPLQIRLKDPISFPYQRQYPLRPEAHKGLQDIVKHLKAQDSVRKCSSPCNTPILGVQKLNSQWRLVQDLRLINEAVIPLYPVVRNPYTLLSQVPEEAEWFTVLDLKDAFFCIPLHSDSQFLFAFEDPTDHTSQLMWMVLPQRFRDSPHLFGQAQAQDLGHFSSPGTLVLQYSEIAKTLYTLIKEMERANTHLVEWEPEAETAFETLKQALVQAPALSLPTGQNFALYVIERAGIALGVLTQTHRTTPQPVAYLSKEIDVVAKGWPHCLRTVVAVAVLVSEAIKIIQGKDFTVWTTHDVNGILGAKGGLWPSDNCLLRYQALLLEEPVLQIHMCIAINPATFLPEDGEPIKHDCQQIIVQTYATQDDLLEVPLANPDFNLYNSGSSFVENGIQRAGYAIVSDVTVLGSKPLSPGTSTQLAELVALTRALELGKGKRINVYTDSKYAYLILHAHAAIWKEREFLTSGGTPIKYHKEIMELLHTVQKPKEVAVLHCQSHQKGSARRIFCLTRIPGTRVCKNPHVSLSGISEWPLRDHTPLCFRPKALLAWVHEEICSMGCKDPGWNSLKVSEEDRKMQESLETSRDLLNGFDQNVDNDMDSKVQAEGASDGDEELIGKWRKGLSMLWKILSIENMMNVWKDGTIKDAIIVIEKAVKAIKPETINSCQRNLCPDVVHDFTRFTTEPIKDIKEIGDLAIKLGIFESSNSTQFLNQFVPDDRLSPHNKLLKFYKPEFYSSYPLVSCLDHYVDQVGARISMSFCVTTVTEASGSGSWTCGVSQLKLSYAD

SEQ ID NO: 13836 - protein, 472 aa, Homo sapiens
  DOMAIN (157)..(174): RNase H domain identified by eMATRIX, accession number PF00075A, p-value=3.160e-12, raw score of 14.44
  DOMAIN (141)..(369): Reverse transcriptase domain identified by PFam, accession name rvt, E-value=1.2e-24, PFam score of 95.3
TWQPQCSIIGTKRNRPKKEKRDQRKATALVTALRQTNLGGSERTENRAGQSPERDTLAKAGAIIYMNMGNKLPICCPLPEEGINPEVWALEGQFGKAKNAHPVQIRLKDPTTFPYQRQYPLRPEAHKGLKDIVKYLKAQALVKKCSSPCNSPILGVQKPNSQWRLVQDLRLINEAVIPLYPVVPNPYILLSQIPEEAEWFTVLDLKDAFFCIPPHSDSQFLFAFEDPTDHMSQLMWTVLPQGFKDSPHLFGQALAQDLGYFSSPGTLVLQYVDDLLLATSSEASCQQATLDLLNFLANQGYKRLLTMDPRTQRDSQAPLYSNQGENQRDKKSKKEVQREEETDKEGVRKRERERQRRSQRERKRDGTSVSTLAVLEEPFSLPMRYGGPYLGLAKTRADSLCLWGGVEGEARVGAGASCSTRRPVRVPGEHRLGRPCTGHGQPAPAGLDRGMCSFWAARVPGLGGAKSHGDCH

SEQ ID NO: 13837 - protein, 50 aa, Homo sapiens
KSEGNEKSEDAEVLDATPSGIMKTDNTEVLLSADFTGAIKVFVNKRKNVS

SEQ ID NO: 13838 - protein, 140 aa, Homo sapiens
  DOMAIN (4)..(44): Zinc finger, C3HC4 type (RING finger) domain identified by PFam, accession name zf-C3HC4, E-value=7.1e-10, PFam score of 36.3
GDSCAVCIELYKPNDLVRILTCNHIFHKTCVDPWLLEHRTCPMCKCDILKALGIEVDVEDGSVSLQVPVSNEISNSASSHEEDNRSETASSGYASVQGTDEPPLEEHVQSTNESLQLVNHEGKFCGQWDVIPSCLTNPTL

SEQ ID NO: 13839 - protein, 73 aa, Homo sapiens
RLSQSVTQAGVQWHDLSSLQPLPSKSKRFSCLSHPNSWDYRHTPQHPANFCIFFFCRDGVSPCWPCWSCPGLK

SEQ ID NO: 13840 - protein, 108 aa, Homo sapiens
  DOMAIN (22)..(31): Zinc finger C3HC4 type (RING finger), proteins. domain identified by eMATRIX, accession number BL00518, p-value=8.286e-10, raw score of 12.23
  DOMAIN (7)..(45): Zinc finger, C3HC4 type (RING finger) domain identified by PFam, accession name zf-C3HC4, E-value=2.9e-16, PFam score of 57.0
MWEEVTCPICLDPFVEPVSIECGHSFCQECISQVGKGGGSVCPVCRQRFLLKNLRPNRQLANMVNNLKEISQEAREGTQGERCAVHGERLHQTHLDQPKTCFCLLYGT

SEQ ID NO: 13841 - protein, 562 aa, Homo sapiens
  DOMAIN (342)..(364): Domain in SPla and the RYanodine Receptor domain identified by eMATRIX, accession number PF00622B, p-value=1.500e-19, raw score of 21.00
  DOMAIN (358)..(478): SPRY domain identified by PFam, accession name SPRY, E-value= 1.3e-40, PFam score of 148.3
RSPHCCLTAHLTMASAARLTMMWEEVTCPICLDPFVEPVSIECGHSFCQECISQVGKGGGSVCAVCRQRFLLKNLRPNRQLANMVNNLKEISQEAREGTQGERCAVHGERLHLFCEKDGKALCWVCAQSRKHRDHAMVPLEEAAQEYQVRPKRHLEKLQVALGELRRKQELAEKLEVEIAIKRADWKKTVETQKSRIHAEFVQQKNFLVEEEQRQLQELEKDEREQLRILGEKEAKLAQQSQALQELISELDRRCHSSALELLQEVIIVLERSESWNLKDLDITSPELRSVCHVPGLKKMLRTCAVHITLDPDTANPWLILSEDRRQVRLGDTQQSIPGNEERFDSYPMVLGAQHFHSGKHYWEVDVTGKEAWDLGVCRDSVRRKGHFLLSSKSGFWTIWLWNKQKYEAGTYPQTPSHLQVLPCQVGIFLDYEAGMVSFYNITDHGSLIYSFSECAFTGPLRPFFSPGINDGGKNTAPSNPLVPLNIGSQGSTDYWMAFSGTLPLSPHWAPASSATKPWPLFPHGTLEPPLSSAEASRDPQQASFSREVTSPINIPAPDGVV

SEQ ID NO: 13842 - protein, 156 aa, Homo sapiens
  DOMAIN (50)..(105): Actins proteins domain identified by eMATRIX, accession number BL00406D, p-value=1.000e-40, raw score of 12.58
  DOMAIN (40)..(156): Actin domain identified by PFam, accession name actin, E- value=3.5e-74, PFam score of 244.7
LKAVHRCTGPEFPGRQRLRHEQGRLRGRRCPPGRLPLHREALFQPSFLGMEACGIHETTFNSIMKGDVDIRKDLYANTVLSGGTTMYPGIADRMQKEITALAPSTMKIKIIAPPERKYSVWIGGYILGWLSTFHQMWISKQEYDESGPFIVHTTCF

SEQ ID NO: 13843 - protein, 79 aa, Homo sapiens; identical to SEQ ID NO: 12937
  DOMAIN (30)..(79): Actins proteins domain identified by eMATRIX, accession number BL00406E, p-value=7.000e-33, raw score of 8.44
  DOMAIN (4)..(79): Actin domain identified by PFam, accession name actin, E- value=3e-35, PFam score of 117.0

SEQ ID NO: 13844 - protein, 60 aa, Homo sapiens
  misc_feature (1)...(60): Xaa = X or * as defined in Table 2
MERPERKIXXXXXXXXXXXXXXXXXXXXXXXXXXXXXXXXXXXXXXXXXXXSYYSFKNLI

SEQ ID NO: 13845 - protein, 278 aa, Homo sapiens
  DOMAIN (173)..(228): Actins proteins domain identified by eMATRIX, accession number BL00406D, p-value=1.000e-40, raw score of 12.58
  DOMAIN (1)..(278): Actin domain identified by PFam, accession name actin, E- value=7.4e-155, PFam score of 509.4
MDDDIAALVVDNSSGMCKAGFAGDDVPWAIFPSIVGCTRHQVMMLHVAPEEHPVLLTEAPLNPKANCEKMTQIMFETFNTPAMYVAIQAMLSLYASVRTAHVQGLHTTAEREIVRDIKKLCYVALDFEREMAMVASSSSLEKSYKLLDGQVITIGNERFHCPEALFQPSFLGMESCGIHKTTFNYIMKCDVDICKDLYTNTVLSGGTTMYPGITNRMQKKITALAPSMMKIKIIAPPERKYSVWISGSILASLSTFQQMWISKQKYDQSGPSIVHECF

SEQ ID NO: 13846 - protein, 234 aa, Homo sapiens
  DOMAIN (129)..(184): Actins proteins domain identified by eMATRIX, accession number BL00406D, p-value=1.000e-40, raw score of 12.58
  DOMAIN (1)..(234): Actin domain identified by PFam, accession name actin, E- value=3.7e-137, PFam score of 451.4
LHVAPEEHPVLLTEAPLNPKANCEKMTQIMFETFNTPAMYVAIQAMLSLYASVRTAHVQGLHTTAEREIVRDIKKLCYVALDFEREMAMVASSSSLEKSYKLLDGQVITIGNERFHCPEALFQPSFLGMESCGIHKTTFNYIMKCDVDICKDLYTNTVLSGGTTMYPGITNRMQKKITALAPSMMKIKIIAPPERKYSVWISGSILASLSTFQQMWISKQKYDQSGPSIVHECF

SEQ ID NO: 13847 - protein, 541 aa, Homo sapiens
  DOMAIN (249)..(304): Actins proteins domain identified by eMATRIX, accession number BL00406B, p-value=1.000e-40, raw score of 5.47
  DOMAIN (166)..(541): Actin domain identified by PFam, accession name actin, E- value=9.4e-266, PFam score of 873.3
MVPSAAAAAGMRCLILKGVDSIGKTERTLQEIGSPCVALASPELLSSRDPVAVDSQGVVGFLHSLLYRSFGICCAYHTQCNDHASHVWLKVPVSGSTAQLSLSCKKEKDILHENSTLREEIAMLRLELDTMKHQSQLREKKYLEDIESVKKRNDNLLKALQLNELTMDDDTAVLVIDNGSGMCKAGFAGDDAPRAVFPSIVGRPRQQGMMGGMHQKESYVGKEAQSKRGILTLKYPMEHGIITNWDDMEKIWHHTFYNELRVAPEEHPVLLTEATLNPKANREKMTQIMFETFNTPAMYVAIQAVLSLYTSGRTTGIVMDSGDGVTHTVPIYEGNALPHATLRLDLAGRELPDYLMKILTEHGYRFTTMAEREIVRDIKEKLCYVALDFEQEMATAASSSSLEKSYELPDGQVITIGNERFRCPEALFQPCFLGMESCGIHETTFNSIMKSDVDIRKDLYTNTVLSGGTTMYPGMAHRMQKEIAALAPSMMKIRIIAPPKRKYSVWVGGSILASLSTFQQMWISKQEYDESGPSIVHRKCL

SEQ ID NO: 13848 - protein, 375 aa, Homo sapiens
  DOMAIN (7)..(42): Actins proteins domain identified by eMATRIX, accession number BL00406A, p-value=1.000e-40, raw score of 9.95
  DOMAIN (1)..(375): Actin domain identified by PFam, accession name actin, E- value=1e-274, PFam score of 902.7
MEEEIAALVIDNGSGMCKAGFAGDDAPRAVFPSIVGRPRHQGVMVGMGQKDSYVGDEAQSKRGILTLKYPIEHGIVTNWDDMEKIWHHTFYNELRVAPEEHPVLLTEAPLNPKANREKMTQIMFETFNTPAMYVAIQAVLSLYASGRTTGIVMDSGDGVTHTVPIYEGYALPHAILRLDLAGRDLTDYLMKILTERGYSFTTTAEREIVRDIKEKLCYVALDFEQEMATAASSSSLEKSYELPDGQVITIGNERFRCPEALFQPSFLGMESCGIHETTFNSIMKCDVDIRKDLYANTVLSGGTTMYPGIADKMQKEITALGPSTMKIKIIAPPERKYSVWIGGSILASLSTFQQMWISKQEYDESGPSIVHRKCF

SEQ ID NO: 13849 - protein, 403 aa, Homo sapiens
  DOMAIN (85)..(140): Actins proteins domain identified by eMATRIX, accession number BL00406B, p-value=1.000e-40, raw score of 5.47
  DOMAIN (1)..(380): Actin domain identified by PFam, accession name actin, E- value=2.3e-209, PFam score of 688.3
MCDEDETTALVCDNGSGLVKAGFAGDDAPRAVFPSIVGRPRHQGVMVGMGQKDSYVGDEAQSKRGILTLKYPIEHGIITNWDDMEKIWHHTFYNELRVAPEEHPTLLTEAPLNPKANREKMTQIMFETFNVPAMYVAIQAVLSLYASGRTTGIVLDSGDGVTHNVPIYEGYALPHAIMRLDLAGRDLTDYLMKILTERGYSFVTTAEREIVRDIKEKLCYVALDFENEMATAASSSSLEKSYELPDGAGHHHRQRALPLPGDPSFIGMEVGGHFTRPPYNSIMKCDIDIQEGPFMPTTFMSGGTHDVPWESLTACRKEITRAGTPAPMEDQDSFAPAGAQNTRVWIGGSILASLSTFQQMWITKQEYDEAGPSIVQPQMLLDTLHLQARDFSRTTNLLNGGGG

SEQ ID NO: 13850 - protein, 423 aa, Homo sapiens
  DOMAIN (54)..(89): Actins proteins domain identified by eMATRIX, accession number BL00406A, p-value=1.000e-40, raw score of 9.95
  DOMAIN (47)..(423): Actin domain identified by PFam, accession name actin, E- value=6.1e-227, PFam score of 746.0
  misc_feature (1)...(423): Xaa = X or * as defined in Table 2
MGDTPRQFGGARPRSGGALRGCRSRGGGNRRGLCLSRALANGDRRLTMDDDIAALVVDNGSGMCKAGFAGDDAPRAVFPSIVGRPRHQGVMVGMGQKDSYVGDKAQSKRGILTLKYRIEHGIVTNWEDMEEIWLHTFYSELHVAPEEHPLLLTEASLNPKANHEKVNQIMFETFNTPAMYVAIQALLSLYASGRTTGIVMDSGDGVTHTVPIYGGYALPHTILHLDLAGPDLTDHLMKILTERGYSFTTTAKREIVHDIEENLCYVALDFEQEMAMVASNPLLEKSXELPDGQVITIGNERFRCPEALFQPSFLGMESCGIHETTFNSIMKCDVDIRKDLYANTVLSGRTPPCTLGIADRMQKEITALAPSTMKMKIIAPPERKYSVWIGGSILASLSTFQQIWISKQEYDESGPSIVHRKCF

SEQ ID NO: 13851 - protein, 123 aa, Homo sapiens
  misc_feature (1)...(123): Xaa = X or * as defined in Table 2
ETESRSVAQAGVQWHNLGSLQPSPSGFKRFSCLSLPSNWDYRHPPSCPANFCIFVETRFHHVGQAGLKLLTSGDPPTLASXIAGITGMSHCAWPSLHIWTLLLFAKCPRRWTGQVLLAAIFSQ

SEQ ID NO: 13852 - protein, 134 aa, Homo sapiens
  misc_feature (1)...(134): Xaa = X or * as defined in Table 2
IHTHTHTHTHTIFFLKRSFALVAQARVQWRDLCSLKPPPPEFKQFSCLSLPSSXDYRCPPPCPANFSFFFVFLVETGFHHVGQAGLKLLTSSDSPTLASQNAGVTGMSHCAWPQSNKYYQNNFTMIQEQQQQKE

SEQ ID NO: 13853 - protein, 101 aa, Homo sapiens
  DOMAIN (6)..(34): !!!! PROTEIN ALU SUBFAMILY WARNING ENTRY NUCLEAR PHOSPHO domain identified by eMATRIX, accession number PD02454B, p-value= 3.275e-10, raw score of 11.61
  misc_feature (1)...(101): Xaa = X or * as defined in Table 2
GGWITRSGVQDQSGQHSVDVSLLKKYKKLTKYGGVLLXSQLSRRLRQDNHMNPGGRSCSXPRQHHCTPAWVTVRDSISKKKKKKNKKKKEKKGKKALLEPG

SEQ ID NO: 13854 - protein, 145 aa, Homo sapiens
  misc_feature (1)...(145): Xaa = X or * as defined in Table 2
INVNFLEFYMTDITCFLFSYLSTLMSPIYLDVLLLSLLLFLFHIAGMHILTFINHDIXVVHSFYLRIXHAMEITVYEFICLRIRYPFKASKIFSMYNATVLFHIXCDRXLGSXIGILERSVGVCSVMVCIVIYIRYVISSSVDAP

SEQ ID NO: 13855 - protein, 105 aa, Homo sapiens
  misc_feature (1)...(105): Xaa = X or * as defined in Table 2
RIYKDRAGSPAHSCQHRDPLRTSPRGPHSLPWGQAAQSDAETEATHMGAPSCLGPAQLPLEPGGRGSHTTSVDSRHDSVEGFRDSRQTESPWNDENXNLLDYGSL

SEQ ID NO: 13856 - protein, 739 aa, Homo sapiens
  DOMAIN (676)..(689): EF-hand calcium-binding domain proteins domain identified by eMATRIX, accession number BL00018, p-value=9.217e-09, raw score of 7.41
MASILLRSCRGRAPARLPPPPRYTVPRGSPGDPAHLSCASTLGLRNCLNVPFGCCTPIHPVYTSSRGDHLGCWALRPECLRIVSRAPWTSTSVGFVAVGPQCLPVRGWHSSRPVRDDSVVEKSLKSLKDKNKKLEEGGPVYSPPAEVVVKKSLGQRVLDELKHYYHGFRLLWIDTKIAARMLWRILNGHSLTRRERRQFLRICADLFRLVPFLVFVVVPFMEFLLPVAVKLFPNMLPSTFETQSLKEERLKKELRVKLELAKFLQDTIEEMALKNKAAKGSATKDFSVFFQKIRETGERPSNEEIMRFSKLFEDELTLDNLTRPQLVALCKLLELQSIGTNNFLRFQLTMRLRSIKADDKLIAEEGVDSLNVKELQAACRARGMRALGVTEDRLRGQLKQWLDLHLHQEIPTSLLILSRAMYLPDTLSPADQLKSTLQTLPEIVAKEAQVKVAEVEGEQVDNKAKLEATLQEEAAIQQEHREKELQKRSEVAKDFEPERVVAAPQRPGTEPQPEMPDTVLQSETLKDTAPVLEGLKEEEITKEEIDILSDACSKLQEQKKSLTKEKEELELLKEDVQDYSEDLQEIRKELSKTGEEKYVEESKASKRLTKRVQQMIGQIDGLISQLEMDQQAGKLAPANGMPTGENVISVAELINAMKQVKHIPESKLTSLAAALDENKDGKVNIDDLVKVIELVDKEDVHISTSQVAEIVATLELEEKVEEKEKAKEKAEKEVAEVKS

SEQ ID NO: 13857 - protein, 73 aa, Homo sapiens
LEMESHSVTQAGVQWRDLGSLQPPPPRFEQSSCLSLPSSWDHRHTPPRLAKCLLLNTQNALNQQKQSPRSEEL

SEQ ID NO: 13858 - protein, 72 aa, Homo sapiens
PCGTWRTPGEGPDEGAGGRAHYHVYLQLKAYLMVAVPRGDLGSRAQEAERYISECKKRAEEKKLGTERIERK

SEQ ID NO: 13859 - protein, 118 aa, Homo sapiens
GWERAHRLVQNYAANGGEAEAGANQGRCGLVRGGEHACRRTAFAAARYTRIWKNSAAICCGPRGGGGGPRPSPLPDTKASSKHAPRDRNDSRPNATPEDPLPVPTLNPRAFPAPVLCP

SEQ ID NO: 13860 - protein, 165 aa, Homo sapiens
PSCGLCRGRGTEGQEPWAPRGGGCIMDHLGASLWPQVGSLCLLLAGAAWAPPPNLPDPKFESKAALLAARGPEELLCFTERLEDLVCFWEEAASAGVGPGNYSFSYQLEDEPWKLCRLHQAPTARGAVRFWCSLPTADTSSFVPLELRVTSSLRRSAISPCHPHQ

SEQ ID NO: 13861 - protein, 58 aa, Homo sapiens
QTPMPFLCRPSPAALLAARGPEELLCFTERLEDLVCFLRSMRSFSSFFSSARFLHSLM

SEQ ID NO: 13862 - protein, 64 aa, Homo sapiens
PARPFVESIATQYMTNKQDHDRMASQWTKGIRSINGGFTILTFFCRSQKRAAYDFEGVREGGSW

SEQ ID NO: 13863 - protein, 24 aa, Homo sapiens
KAVDKKAAGAGKVTKSAQIAQKAK

SEQ ID NO: 13864 - protein, 33 aa, Homo sapiens
RNSWVDPPPEAVDKKAAGAGKVSMSAQKAQKAK

SEQ ID NO: 13865 - protein, 18 aa, Homo sapiens
AGRCAQHGQPPAAPACRE

SEQ ID NO: 13866 - protein, 205 aa, Homo sapiens
  DOMAIN (166)..(180): GTP-binding elongation factors proteins domain identified by eMATRIX, accession number BL00301C, p-value=4.600e-11, raw score of 11.73
  DOMAIN (11)..(161): Elongation factor Tu family domain identified by PFam, accession name GTP_EFTU, E-value=3.1e-36, PFam score of 124.8
GFRPGDPRVRETGVLKPGMLVTFAPVNVTGGVKSVEMHHEALSEALPGDNVGFNVKNVSVKDVRRGNVAGDSKNDPPMEAAGFTAQVIILNHPGQISAGYAPVLDCHTAHIACKFAELKEKIDRRSGKKLEDGPKFLKSGDAAIVDMVPARPMCVESFSDYPPLGRFAVRDMRQIVAVGVIKAGDKKAAGAGKVTKSAQKAQKAK

SEQ ID NO: 13867 - protein, 30 aa, Homo sapiens
AAQRHETLTSLNLEKKARLKEEAAMKAKTE

SEQ ID NO: 13868 - protein, 164 aa, Homo sapiens
  misc_feature (1)...(164): Xaa = X or * as defined in Table 2
QVAMGNLSGLRLAAGSCFRLCERDVSSSQRLTRSSDWKGINGFCTKPTGKVPGAPIPALTNRVPFNTKPTDWQKKRPLIWSRSPSKMEDEIPQSLSPLEDALNACQRTKMPSERSSLSQWICPDGGMDCIFMVIEGQKAAQRHDDFTQAXTLEKKARLERGKQL

SEQ ID NO: 13869 - protein, 64 aa, Homo sapiens
  DOMAIN (26)..(43): Eukaryotic thiol (cysteine) proteases cysteine proteins domain identified by eMATRIX, accession number BL00139D, p-value= 2.333e-16, raw score of 9.24
  DOMAIN (1)..(63): Papain family cysteine protease domain identified by PFam, accession name Peptidase_C1, E-value=8.3e-34, PFam score of 124.4
YEPSCTQNVNHGVLVVGYGDLNGKEYWLVKNSWGHNFGEEGYIRMARNKGNHCGIASFPSYPEI

SEQ ID NO: 13870 - protein, 355 aa, Homo sapiens
  DOMAIN (155)..(171): PAPAIN CYSTEINE PROTEASE (C1) FAMILY SIGNATURE domain identified by eMATRIX, accession number PR00705A, p-value=5.200e- 17, raw score of 10.55
  DOMAIN (137)..(355): Papain family cysteine protease domain identified by PFam, accession name Peptidase_C1, E-value=3.3e-95, PFam score of 329.7
  misc_feature (1)...(355): Xaa = X or * as defined in Table 2
NLRREPTNSRTLTVGATAGSITMKRLVCVLLVCSSAVAQLHKDPTLDHHWHLWKKTYGKQYKEKNEEAVRRLIWEKNLKFVMLHNLEHSMGMHSYDLGMNHLGDMTSEEVMSLMSSLRVPSQWQRNITYKSNPNRILPDSVDWREKGCVTEVKYQGSCGACWAFSAVGALEAQLKLKTGKLVSLSAQNLVDCSTEKYGNKGCNGGFMTTAFQYIIDNKGIDSDASYPYKAMDLKCQYDSKYRAATCSKYTELPYGRXDVLKEAVANKGPVSVVVDARQPSFLPLQESGVYYDPSCTQNVNHGVLVVGYGDLNGKEYWLVXNSWGPNFGEEGYIRLWARNKGNHCGIASFPSYPEI

SEQ ID NO: 13871 - protein, 95 aa, Homo sapiens
  DOMAIN (57)..(74): Eukaryotic thiol (cysteine) proteases cysteine proteins domain identified by eMATRIX, accession number BL00139D, p-value= 2.333e-16, raw score of 9.24
  DOMAIN (16)..(94): Papain family cysteine protease domain identified by PFam, accession name Peptidase_C1, E-value=3.5e-43, PFam score of 156.9
VLKELWPNKGQCLFGVDARHLPFFLYRSGVYYEPSCTQNVNHGVLVVGYGDLNGKEYWLVKNSWGHNFGEEGYIRMARNKGNHCGIASFPSYPEI

SEQ ID NO: 13872 - protein, 41 aa, Homo sapiens
PDQGQYCMKRMPAYSGPGTAPGALDYPAHCTALYGESDLRC

SEQ ID NO: 13873 - protein, 32 aa, Homo sapiens
QSCSVAQAGVQWHELGSLQSSLGKKSETPSQK

SEQ ID NO: 13874 - protein, 167 aa, Homo sapiens
THASDCLYRAVSKTVYGDQSLHRELREQTVHYIADHLDHFSPLIEGDVGEFIIAAAQDGAWAGYPELLAMGQMLNVNIHLTTGGRLESPTVSTMIHYLGPEDSLRPSIWLSWLSNGHYDAVFDHSYPNPEYDNWCKQTQVQRKRDEELAKSMAISLSKMYIEQNACS

SEQ ID NO: 13875 - protein, 34 aa, Homo sapiens
  DOMAIN (1)..(33): Ribosomal L38e protein family domain identified by PFam, accession name Ribosomal_L38e, E-value=6.6e-07, PFam score of 36.4
RCSRYLYTLVITDKEKAEKLKQSLPPGLAVKELK

SEQ ID NO: 13876 - protein, 41 aa, Homo sapiens
QPKMKYSGMPGLLPSVRSVQAILDGSLRPPKKTCHLKNFGA

SEQ ID NO: 13877 - protein, 36 aa, Homo sapiens
  DOMAIN (1)..(35): Ribosomal L38e protein family domain identified by PFam, accession name Ribosomal_L38e, E-value=6.5e-08, PFam score of 39.7
KVRCCRYLYTLVITDKEKAEKLKQSLPPGLAVKELK

SEQ ID NO: 13878 - protein, 63 aa, Homo sapiens
  DOMAIN (2)..(63): Ribosomal L38e protein family domain identified by PFam, accession name Ribosomal_L38e, E-value=1.2e-38, PFam score of 141.8
  misc_feature (1)...(63): Xaa = X or * as defined in Table 2
MPRKIEEIKDFLLTARRKDAKSVKIKKNKDNVKFKVRCSRYLYTLVITDKEKAEKLKQSLPXX

SEQ ID NO: 13879 - protein, 69 aa, Homo sapiens
  DOMAIN (24)..(69): Ribosomal L38e protein family domain identified by PFam, accession name Ribosomal_L38e, E-value=1.7e-15, PFam score of 64.9
NCGNQRTSLRHRPTKRMPNSCQDPRKIRTLVKFKVRCSRYLYTLVITDKEKAEKLKQSLPPGLAVKELK

SEQ ID NO: 13880 - protein, 34 aa, Homo sapiens; identical to SEQ ID NO: 13875
  DOMAIN (1)..(33): Ribosomal L38e protein family domain identified by PFam, accession name Ribosomal_L38e, E-value=6.6e-07, PFam score of 36.4

SEQ ID NO: 13881 - protein, 36 aa, Homo sapiens; identical to SEQ ID NO: 13877
  DOMAIN (1)..(35): Ribosomal L38e protein family domain identified by PFam, accession name Ribosomal_L38e, E-value=6.5e-08, PFam score of 39.7

SEQ ID NO: 13882 - protein, 63 aa, Homo sapiens; identical to SEQ ID NO: 13878
  DOMAIN (2)..(63): Ribosomal L38e protein family domain identified by PFam, accession name Ribosomal_L38e, E-value=1.2e-38, PFam score of 141.8
  misc_feature (1)...(63): Xaa = X or * as defined in Table 2

SEQ ID NO: 13883 - protein, 69 aa, Homo sapiens; identical to SEQ ID NO: 13879
  DOMAIN (24)..(69): Ribosomal L38e protein family domain identified by PFam, accession name Ribosomal_L38e, E-value=1.7e-15, PFam score of 64.9

SEQ ID NO: 13884 - protein, 41 aa, Homo sapiens
YGPTHASGAMLRSCAARLRTLGALCLPPVGRRLPEASRDPS

SEQ ID NO: 13885 - protein, 96 aa, Homo sapiens
MLRSCARRLRTLGALCQPPPVGRRLPGSEPQPALRSFSSEEVILKDYSVPNPSWNKDLRLLFDQFMKKCEDGSWKRLPSYKRTPTERIQDFKTHFL

SEQ ID NO: 13886 - protein, 137 aa, Homo sapiens
  DOMAIN (30)..(78): Ubiquitin-conjugating enzymes proteins domain identified by eMATRIX, accession number BL00183, p-value=2.250e-27, raw score of 28.97
  DOMAIN (1)..(133): Ubiquitin-conjugating enzyme domain identified by PFam, accession name UQ_con, E-value=2.9e-68, PFam score of 240.2
RRLMRDFKRLQEDPPVGVSGAPSENNIMQWNAVIFGTFKLVIEFPEEYPNKPPTVRFLSKMFHPNVYADGSICLDILQNRWSPTYDVSPILTSIQSLLDEPNPNSPANSQAAQLYQENKREYEKRVSAIVEQSWNDS

SEQ ID NO: 13887 - protein, 46 aa, Homo sapiens
AGLLQNTAGFLGMPGLLPSVRSVQAHIGMGSLRPPKKTCHLKNFGA

SEQ ID NO: 13888 - protein, 109 aa, Homo sapiens
  DOMAIN (1)..(105): Ubiquitin-conjugating enzyme domain identified by PFam, accession name UQ_con, E-value=5.4e-34, PFam score of 126.4
ARRRLMRDFKRLQEDPPVGVSGAPSENNIMQWNAVIFGYADGSICLDILQNRWSPTYDVSSILTSIQSLLDEPNPNSPANSQAAQLYQENKREYEKRVSAIVEQSWNDS

SEQ ID NO: 13889 - protein, 122 aa, Homo sapiens
  DOMAIN (54)..(102): Ubiquitin-conjugating enzymes proteins domain identified by eMATRIX, accession number BL00183, p-value=3.571e-24, raw score of 28.97
  DOMAIN (10)..(122): Ubiquitin-conjugating enzyme domain identified by PFam, accession name UQ_con, E-value=1.1e-30, PFam score of 115.3
KLTAGQLRSMSTPARRRLMRNFKRLQKDPPGGVRGAPFENNIMQGNAVIFGPKGTPFEKGTFKLVKEFFEKYPNKPPPVRFLSKRFHPNVYAEWSICLNILQNRWSPTYEGSSILTSIQPLL

SEQ ID NO: 13890 - protein, 45 aa, Homo sapiens
ECVTNFSIVFAVYADGSICLDILQNRWSPTYDVSSILTSIQVSVC

SEQ ID NO: 13891 - protein, 189 aa, Homo sapiens
  DOMAIN (31)..(189): Ubiquitin-conjugating enzyme domain identified by PFam, accession name UQ_con, E-value=2.3e-14, PFam score of 61.2
  misc_feature (1)...(189): Xaa = X or * as defined in Table 2
HSDSAAAPGGGGAARDFFFFQTDRRGSCGACSTPARRRLMRDFKRLQEDPPVGVSGAPSENNIMQWNAVIFGPGGTPFEDGTFXLVIEFSEEYPNKPPTVRVFIPKMFPSPNVYAXWVGICLDILQNRWESQHMDVSFLSLTFNSVSGWDEPNPXQSSPIAQAAQLYQENKREYEKRVSAIVEQSWNDS

SEQ ID NO: 13892 - protein, 87 aa, Homo sapiens
  DOMAIN (14)..(24): Eukaryotic  RNA-binding region RNP-1 proteins domain identified by eMATRIX, accession number BL00030B, p-value=3.368e- 09, raw score of 7.03
  misc_feature (1)...(87): Xaa = X or * as defined in Table 2
YCGPLXSVWVARNPPGFAFVEFEDPRDAAGVVXELDGRTLCGPPSWGHRPXDDYCRRGLPPRRRPPRRRNLSCSRSRSLYSPWTLSL

SEQ ID NO: 13893 - protein, 53 aa, Homo sapiens
GRSHLSNGEKRSRNRGPPPSWGRRPRDDYRRRSPPPRRRYLRESLLRGIGVME

SEQ ID NO: 13894 - protein, 315 aa, Homo sapiens
  DOMAIN (55)..(65): Eukaryotic  RNA-binding region RNP-1 proteins domain identified by eMATRIX, accession number BL00030B, p-value=3.368e- 09, raw score of 7.03
  DOMAIN (21)..(87): RNA recognition motif. domain identified by PFam, accession name rrm, E-value=1.1e-13, PFam score of 58.9
  misc_feature (1)...(315): Xaa = X or * as defined in Table 2
IFLVFFITEMHRDSCPLDCKVYVGNLGNNGNKTELERAFGYYGPLRSVWVARNPPGFAFVEFEDPRDAAXVXYLCPLRTLCGCRVRVELSNGEKRSRNRGPPPSWGRRPRDDYRFPSMLFSLSLLSNLNQIGSSHLDRPHIPGQSAQLFIYQMSSQQLQQQPSANKKAGKIHNTPFANQLNPTATSGQNLFRQILPGPSVRAGLTFTISSLLKPKTNLQEGEASLAAGAGPFLEIGEERDRCLGREITSRPDPSLGLVVDLGQMKGNRRQFAREVVYRKLLHLTGVCTENFKFCLRLHKLGAFLRCFSCSNLFVS

SEQ ID NO: 13895 - protein, 94 aa, Homo sapiens
  DOMAIN (12)..(22): Eukaryotic  RNA-binding region RNP-1 proteins domain identified by eMATRIX, accession number BL00030B, p-value=3.368e- 09, raw score of 7.03
  DOMAIN (1)..(44): RNA recognition motif. domain identified by PFam, accession name rrm, E-value=0.063, PFam score of 15.2
PLRSVWVARNPPGFAFVEFEDPRDAADAVRELDGRTLCGCRVRVELSNGEKRSRNRGPPPSWGRRPRDDYRRRSPPPRRRVTIMSLLTTLSNLH

SEQ ID NO: 13896 - protein, 147 aa, Homo sapiens
  DOMAIN (17)..(36): Eukaryotic  RNA-binding region RNP-1 proteins domain identified by eMATRIX, accession number BL00030A, p-value=5.286e- 09, raw score of 14.39
  DOMAIN (18)..(86): RNA recognition motif. domain identified by PFam, accession name rrm, E-value=0.094, PFam score of 13.5
  misc_feature (1)...(147): Xaa = X or * as defined in Table 2
PLDLEMHRDSCPLDCKVYVGNLGNNGNKTELERAFGYYGPLRSVWVARNPPRPLAFVEFEDPPRMQLDAVPRSXDGKNTNVACPCKEWELVRMGEKRSRNRGPPPSLWGRRPRDGFIRREGVPPTLFGRSPRKGGRFLFAARSRSLS

SEQ ID NO: 13897 - protein, 83 aa, Homo sapiens
VLLARLQANGANTVELSAEWTFPSGYVGSVLPQGHREPNALCLSFSKFRVLGSAPFLINRRTASNCVNRYCRLAATWRAVLPL

SEQ ID NO: 13898 - protein, 157 aa, Homo sapiens
  misc_feature (1)...(157): Xaa = X or * as defined in Table 2
CLVFWLLYYPGLQLPFHLLPHSLGSGQQSSEESAATPSLAEGRREAAFRCGPAGLARQAWRPHARLPGPAAPLAAPSLAPLPTGRSGRWLPMLCAASCXSPSPAMSVYPQRRLGQGGAEDSEGGPVSRGCRAPGPQRPLAAPGEQTAARTQAICLIW

SEQ ID NO: 13899 - protein, 105 aa, Homo sapiens
  misc_feature (1)...(105): Xaa = X or * as defined in Table 2
AFAFTKDRQLGSSKKRRMSSRFASSAAKCRAVRPLLRSRRFPPVPMPPGPWVSSTKLGSRLGRHQASCRGXSQRARXSGLTGPTHMEPNKVRSTGLKFLLPAQQS

SEQ ID NO: 13900 - protein, 38 aa, Homo sapiens
  misc_feature (1)...(38): Xaa = X or * as defined in Table 2
EINLTNFICFSSRSDVSXRESPFSRELHRISSISLEPG

SEQ ID NO: 13901 - protein, 571 aa, Homo sapiens
  DOMAIN (281)..(314): RECEPTOR INTERLEUKIN-1 PRECURSOR domain identified by eMATRIX, accession number PD02870B, p-value=5.553e-11, raw score of 18.83
MKLPEEGAGSNICCSAIFAVLQPPLVIPRQTVSGVDLQQTPTDLQLRVLTLRRKTSKQKGHTHQNPICMSPSSRTKGRQRDKLEEILRGLTPRKNDIGDAMVFCLNNAEAAEEIVDCITESLSILKTPLPKKACAPRVVSGAGPAGTWLALGAGAAFRPGLHGAAGGHPPGRGEVGGVRTRRTRPPRAPDRATGVSSPPGPASAGNPPKSYRVHVHKVQVCYIGIHVPCWFAAAVKLSCTLDICPNAMVSAARQVPTGAGTPVRRQEGSIEVYEDAGSHYLCLLKAGPRDSGTYSCTASNAQGQLSCSWTLQVETHPSFLIPHLSLRPSATRNPGFRFSSFSHRPRPLPLALGPRTRHVPLSSLTLQVCFRWGRGRQVLSPAGGLCVPRALLRWDLRGDTQSPEKLYMPKTIKETSLSTYHVPGITLNDRSIINKIDPGVEESPLDLHVCHGNNYVDEKPALLLLSGKLGCPSLTSCYSNCLSYGNRCRLLQELVVNQHVEQQPHYTHKPTLEYSPFPIPPQSPAYEPNLFDGPESQFCPNQSLVSLLGDQRESENIANPMQTSSSGQAAK

SEQ ID NO: 13902 - protein, 263 aa, Homo sapiens
MGFRHVGQAGLKLLTSSDLPALASQVQCKLVVPASAERHISPLQRGLIAFSLRPDPGLAGDRASLGVPLCGYRIGNPRRSPKRTRHCARTAAVSCSAYSKCLYQFRPNVGHSASTPKAMCQTTAAGEGAHAADEGYTQRVVGARRGTPQRYTGGAETKNRAFRSYPKMETSWPRGGGSTPPVALDAQVERECALGSGAQGKHSCLAVRVVLIFCINEHYPQTLTYRLPFVLPLRSGGTPTSWRALFFPSSSDSNCKLCGGTSS

SEQ ID NO: 13903 - protein, 97 aa, Homo sapiens
  misc_feature (1)...(97): Xaa = X or * as defined in Table 2
SPEMESHPITQAGVQWHNHSSLQPEIPGLKQSSHLSLPSSWDHRXEPLPWPKNIFKMLILXIGFSHVIGNNGTYLYQSINNVEGPLKRSQKDRSCGN

SEQ ID NO: 13904 - protein, 84 aa, Homo sapiens
GLTLPPRLGCHATITAHYSLNLPGSSNPPTSASQVAGTTHSRPCPEITQTALQRGPTGLTTKASRPKARRGSKVSWTIAILPPQ

SEQ ID NO: 13905 - protein, 658 aa, Homo sapiens
  DOMAIN (204)..(226): SPUMAVIRUS ASPARTIC PROTEASE (A9) SIGNATURE domain identified by eMATRIX, accession number PR00920E, p-value=6.870e-09, raw score of 13.24
  DOMAIN (500)..(533): TPR Domain domain identified by PFam, accession name TPR, E- value=0.058, PFam score of 20.0
MERLETINILTLEKADLKTTLYHTKRAARHFEEESKDLAGRLQYSLQRIQELERALCAVSTQQQEEDRGHCLSSPDQNFSLFTIQSSSCREAVLHRRLQQTIKERALLNAHVTQVTESLKQVQLERDEYAKHIKGERARWQERMWKMSVEARTLKEEKKRDIHRIQELERSLSELKNQMGKMGLLQDEAKHLRQEVEGLEGKLQSQVENNQALSLLSKEQKQRLQEQEEMLREQEVQRVREQERLCEQNERLREQQKTLQEQGERLRKQEQRLRKQEERLRKEEERLQKQEKRLWDQEERLWKKEERLQKQEERLALSQNHKLDKQLAEPQCSFEDLNNEKKSALQLEQQVKELQEKLDEVKEMQYVATYQQLTSEKEALHRQLLLQTQLVDQLQQQEAWGKAEHLEAASQQNQQLETQLSLVALPGEDPLMLLVSHLLIALAPHPFREPVVRHFVTCDQQLGIYQKAFEHLGNALTYDPTNYKAISCLKRANYLAPFDWKILYNLGLVHLTMQQYASAFHFLSAAINFQPKMGELYMLLAGLLSTCNPLVNLNYAVLLYNQGEKKNALAQYQEMEKKVSLLKDNSSLEFDSEVCLLLAPKSHNQSNQTRERKGIQISKEEVKLSLFADDMIVYLENLKDSSKKLLELYLSEYWSFSV

SEQ ID NO: 13906 - protein, 106 aa, Homo sapiens
LLSTCNPLVNLNYAVLLYNQGEKKNALAQYQEMEKKVSLLKDNSSLEFDSEVCLLLAPKSHNQSNQTRERKGIQISKEEVKLSLFADDMIVYLENLKDSSKKLLEL

SEQ ID NO: 13907 - protein, 28 aa, Homo sapiens
MADLPIFLVEFSCFIIYFNGSFMFSQKK

SEQ ID NO: 13908 - protein, 362 aa, Homo sapiens
  DOMAIN (69)..(90): PROTEIN REPEAT DOMAIN TPR NUCLEA domain identified by eMATRIX, accession number PD00126A, p-value=5.846e-10, raw score of 22.53
  DOMAIN (62)..(265): TPR Domain domain identified by PFam, accession name TPR, E- value=2.6e-29, PFam score of 110.8
MQGFVYNHQVNLETTKVLTSTGSTLQTSGSQKEVLRPTGSTRKLAGKAQDQLHNALNLNRHDLTYIMLGKIHLLEGDLDKAIEVYKKAVEFSPENTELLTTLGLLYLQLGIYQKAFEHLGNALTYDPTNYKAILAAGSMMQTHGDFDVALTKYRVVACAVPESPPLWNNIGMCFFGKKKYVAAISCLKRANYLAPFDWKILYNLGLVHLTMQQYASAFHFLSAAINFQPKMGELYMLLAVALTNLEDIENAKRAYAEAVHLDKCNPLVNLNYAVLLYNQGEKKNALAQYQEMEKKVSLLKDNSSLEFDSEMVEMAQKLGAALQVGEALVWTKPVKDPKSKHQTTFNQQTWPVSSSLWALIKL

SEQ ID NO: 13909 - protein, 187 aa, Homo sapiens
  misc_feature (1)...(187): Xaa = X or * as defined in Table 2
CRQTGVKIYDVWFFWLLYYPGLQLPFHLLPHSLGSGQQSSEESAATPSLAEGRREAAFRCGPAGLARQAWRPHARLPGPAAPLAAPSLAPLPTGRSGRWLPMLCAASCXSPSPAMSVYPQRRLGQGGAEDSEGGSVSRGCRAPGPQRPLAAPGEQTAARTQASVYLLLPHSPPLLSALHIHHLLPPS

SEQ ID NO: 13910 - protein, 122 aa, Homo sapiens
GTSLKQEEAFRSYFEIFNGPGEVDAQSLKNILLLMGFSVTLAQVEDALMSADVNGDGREDFKDFLAVMTDTTRFFCFAEQNALSDMALSNPHTLLFEILHLPLYMLALPNARLCDIPDCILI

SEQ ID NO: 13911 - protein, 79 aa, Homo sapiens
HERNEYFRSEDLKLQISTETITLSHGSSTFSLSWSDTAQVTNQRVQISVKKEKVVTITLDKEMSFTVVLTRVWNHAIFI

SEQ ID NO: 13912 - protein, 87 aa, Homo sapiens
VLEIKKKEIIPTSTPYSTLPPLKTDLPPLYPQVPPPSQCQTPAIHRMATPPLKPQNFKALLRKWHHGLFIFPFFKGKSLKKFPSENS

SEQ ID NO: 13913 - protein, 90 aa, Homo sapiens
PDRPTRPAVPMSPSSHSPEGRPPPLLPGGPVCKAAASAPSSLLDQPCLCPAPSVRTAVALTTPDITLVLPPDVIQQEASALREETEAWAR

SEQ ID NO: 13914 - protein, 590 aa, Homo sapiens
  DOMAIN (352)..(368): Protein kinases ATP-binding region proteins domain identified by eMATRIX, accession number BL00107B, p-value=5.500e-15, raw score of 13.31
  DOMAIN (36)..(478): Eukaryotic protein kinase domain identified by PFam, accession name pkinase, E-value=3.3e-21, PFam score of 80.4
  misc_feature (1)...(590): Xaa = X or * as defined in Table 2
AASPGVLVCPQARTYIQSLPPALDVQLTPLPTTGFPAAIDLLGRMLVLDSDQRVSAAEALAHAYFSQYHDPEDEPEAEPGPGCGRHKLTLSLHLLELTYQEVLSWDEAAGRRSPPPALPPRLRPSPGSGPPPAAAASGFRRWAAPGPAMSSPPPARSGFYRQEVTKTAWEVRAGACAGCPAFPLSGPPRSSAVDGRTGAKVAIKKLYRPFQSELFANPARVLCCILNPMWPPQVIGHAEAGSVRXQRSGPSHSYLVMPFMGTDLGKLMKHEKLGALRGCAEACHHAWEGGAQWPPFLCPHRSLGVPXNPPPQFFPQILDFGLARQADSEMTGYVVTRWSHPVPLPTELTRASISVDIWSVGCIMAEMITGKTLCSCPGGGSGGPDLWPPSCVPDLGADLDQLKEIMKVADLGLGVGPSPFLPTQAKNYMKGLPEWSVGPPVVWPDAPSPAAVNLLEKMLVLDAEQRVTAGEALAHPYFESLHDTEDEPQVQKATTDGPSLPSDPHASPGHPGLGDVIAISSGATLTCGMAAVHTGPKVWAHRWPEDWGVAFALQTPRPPRLSPQVFLRPGRVGLGAALDPDPGWGAGRDL

SEQ ID NO: 13915 - protein, 75 aa, Homo sapiens
WAAPGPAMSSPPPARSGFYRQEVTKTAWEVRAGACAGCPAFPLSGPPRSSAVDGRTGAKVAIKKLYRPFQSELFA

SEQ ID NO: 13916 - protein, 38 aa, Homo sapiens
QRSGPSHSYLVMPFMGTDLGKLMKHEKLGALRGCAEAC

SEQ ID NO: 13917 - protein, 101 aa, Homo sapiens
TKRAPAQYSGRTRLCTRSSGPTRGDGQERVPLRGSWAAESLGAQPGGSRVLACTSTRSPGLTRGKCPRLPLSPPPSRHSRASVKSTRAGAPEIRHGNAGSA

SEQ ID NO: 13918 - protein, 39 aa, Homo sapiens
ARGSTKPKMQLRKPPVICGDSRAQLLIYGHLLAPWAGVL

SEQ ID NO: 13919 - protein, 472 aa, Homo sapiens
  DOMAIN (248)..(279): Protein kinases ATP-binding region proteins domain identified by eMATRIX, accession number BL00107A, p-value=8.875e-21, raw score of 18.39
  DOMAIN (132)..(416): Eukaryotic protein kinase domain identified by PFam, accession name pkinase, E-value=3.2e-84, PFam score of 293.2
ACGRFGFPEGPEGGRGRHVRAARGPVGPRAGEGPCAAWVGVGPGSAPGTSLREGPGAGAPQRPAGGRASGRAARSRPEARAEGAPSPVVGAPPAGSAGWAAPGPAMSSPPPARSGFYRQEVTKTAWEVRAVYRDLQPVGSGAYGAVCSAVDGRTGAKVAIKKLYRPFQSELFAKRAYRELRLLKHMRHENVIGLLDVFTPDETLDDFTDFYLVMPFMGTDLGKLMKHEKLGEDRIQFLVYQMLKGLRYIHAAGIIHRDLKPGNLAVNEDCELKILDFGLARQADSEMTGYVVTRWYRAPEVILNWMRYTQTVDIWSVGCIMAEMITGKTLFKGSDHLDQLKEIMKVTGTPPAEFVQRLQSDEAKNNMKGLPELEKKDFASILTNASPLAVNLLEKMLVLDAEQRVTAGEALAHPYFESLHDTEDEPQVQKYDDSFDDVDRTLDEWKRVTYKEVLSFKPPRQLGARVSKETPL

SEQ ID NO: 13920 - protein, 95 aa, Homo sapiens
  misc_feature (1)...(95): Xaa = X or * as defined in Table 2
RRSLALSPSPECSDVISAHCKLCLPGFTPFSCLSLLSSWDYRCPPPRLANFFFVFLVETGFHRVSQDGLDLLTSXSARLSLPKCWDYRCEPPRPA

SEQ ID NO: 13921 - protein, 283 aa, Homo sapiens
  DOMAIN (47)..(63): Protein kinases ATP-binding region proteins domain identified by eMATRIX, accession number BL00107B, p-value=5.500e-15, raw score of 13.31
  DOMAIN (10)..(171): Eukaryotic protein kinase domain identified by PFam, accession name pkinase, E-value=6.7e-16, PFam score of 61.3
NPPPQFFPQILDFGLARQADSEMTGYVVTRWSHPVPLPTELTRASISVDIWSVGCIMAEMITGKTLCSCPGGGSGGPDLWPPSCVPDLGADLDQLKEIMKVADLGLGVGPSPFLPTQAKNYMKGLPEWSVGPPVVWPDAPSPAAVNLLEKMLVLDAEQRVTAGEALAHPYFESLHDTEDEPQVQKATTDGPSLPSDPHASPGHPGLGDVIAISSGATLTCGMAAVHTGPKVWAHRWPEDWGVAFALQTPRPPRLSPQVFLRPGRVGLGAALDPDPGWGAGRDL

SEQ ID NO: 13922 - protein, 102 aa, Homo sapiens
GDKVAHSVTKVGVQWHNHCSPQPRPSGLKRSSSLSLQSSWDHRRMPPCLAHFLIFCRDGVLLGLPRLGVALLGLKRSSHLGLPKVLRITGSEATILGPQGFS

SEQ ID NO: 13923 - protein, 104 aa, Homo sapiens
LPGNFFFFFSDGVSLLLPRLGGQWHHLGSLQPPPPGFQRFSCLSLPSSWDYRLLPPRLARKFFVVNMTFGLISSFNSTSFVHKSQECFRQKTGFTLLIIRRSVL

SEQ ID NO: 13924 - protein, 207 aa, Homo sapiens; identical to SEQ ID NO: 8337
  DOMAIN (55)..(90): Ribosomal protein L3 proteins domain identified by eMATRIX, accession number BL00474C, p-value=6.571e-34, raw score of 21.74
  DOMAIN (1)..(153): Ribosomal protein L3 domain identified by PFam, accession name Ribosomal_L3, E-value=2.7e-80, PFam score of 280.2

SEQ ID NO: 13925 - protein, 417 aa, Homo sapiens
  DOMAIN (80)..(110): Ribosomal protein L3 proteins domain identified by eMATRIX, accession number BL00474B, p-value=7.500e-24, raw score of 21.72
  DOMAIN (50)..(370): Ribosomal protein L3 domain identified by PFam, accession name Ribosomal_L3, E-value=1.1e-104, PFam score of 361.2
  misc_feature (1)...(417): Xaa = X or * as defined in Table 2
MSHRKFSAPRHGSLGFLPRKRSSRHRGKVKSFPKDDPSKPVHLTAFLGYKAGMTHIVREVDRPGSKVNKKEVVEAVTIVETPPMVVVGIVGYVETPRGLRTFKTVFAEHISDECKRRFYKNWHKSKKKAFTKYCKKWQDEDGKKQLEKDFSSMKKYCQVIRVIAHTQMRLLPLRQNKAHLMXIQVNGGHCGPRSWDWPPREGLKQQGTVDPSVLGRNKMIDVIGVTQGPKGYKGGHPVVWHTQESCPRKDHHPRACRKGGHVLGAWHPARVAFSVARAGQKGYHHRTEITKKDIYKIGPGLSPLFRTAKVIKGTIASTDYDLFXQEASTPPGGFVHYGEVTNDFVMLKGCVVGTKKRVLTLRKSLLVQTKRRALEKIDLKFIDTTSKFGHGRFQTMEEKKAFMGPLKKDRIAKEEGA

SEQ ID NO: 13926 - protein, 56 aa, Homo sapiens
PTRPATQSNICDEDSATETCYTYDRNKCYTAVVPLVYGGETKMVETALTPDACYPD

SEQ ID NO: 13927 - protein, 66 aa, Homo sapiens
SLCTELPPSSSAFSSSSSSPAFPPFWSSSSSISRASTSSSSSSPSSWSPLCTSFQPLDKAARDRAS

SEQ ID NO: 13928 - protein, 171 aa, Homo sapiens
LQFFRRSEVKMKNHLLFWGVLAVFIKAVHVKAQEDERIVLVDNKCKCARITSRIIRSSEDPNEDIVERNIRIIVPLNNRENISDPTSPLRTRFVYHLSDLCKKCDPTEVELDNQIVTATQSNICGWMTVPQSTCYTLSTGNKCYTAVVPLVYGGETKMVETALTPDACYPD

SEQ ID NO: 13929 - protein, 90 aa, Homo sapiens
EDSATETCYTYDRNKCYTAVVPLVYGALWPRRWRRRLRSVPAAAAAGLLEDPAVPGLTAALPAVELPERRRRQQRQRQAPGHQLLPRSGR

SEQ ID NO: 13930 - protein, 50 aa, Homo sapiens
FFFVFLVETEFYLVGQASLELVTSGDPAASASQSAGITGVSHACSPFQAF

SEQ ID NO: 13931 - protein, 78 aa, Homo sapiens
  misc_feature (1)...(78): Xaa = X or * as defined in Table 2
PFKKGGFFNGNLPTTFGKLGNKKFPLNLFPGGPPLPHGGLKKGPGAPQVPPLFLKKPQTSPPXGLREGPPPLKKFYLF

SEQ ID NO: 13932 - protein, 312 aa, Homo sapiens; identical to SEQ ID NO: 9627

SEQ ID NO: 13933 - protein, 341 aa, Homo sapiens; identical to SEQ ID NO: 9628

SEQ ID NO: 13934 - protein, 85 aa, Homo sapiens
  misc_feature (1)...(85): Xaa = X or * as defined in Table 2
KYLEQCLKHGKSSXHSILQANFFASENDRAKMKXKPCFYKCFXAITFLREDWDYRREPLRLAYPVYFLTCKIRIMYTHLKDYTGH

SEQ ID NO: 13935 - protein, 50 aa, Homo sapiens; identical to SEQ ID NO: 11149

SEQ ID NO: 13936 - protein, 87 aa, Homo sapiens
  DOMAIN (54)..(74): VASOPRESSIN V2 RECEPTOR SIGNATURE domain identified by eMATRIX, accession number PR00898F, p-value=7.686e-09, raw score of 9.10
GAISAHRNLRLPGSSDSSASSSQPGVVPRGRWSPTSCSHGKHHQRPGVRGAPRRQGCTLRGRRRPCPGEGAQDHGGEYGRPQRVQPP

SEQ ID NO: 13937 - protein, 51 aa, Homo sapiens
  misc_feature (1)...(51): Xaa = X or * as defined in Table 2
RDLGSLQPPPPGFKXFSCLRLPSPQVQRCCVPSPWLLEQMITAWGASIHRN

SEQ ID NO: 13938 - protein, 211 aa, Homo sapiens
PSCCSGISHATRSSFTLLVSQANDTVDCTAFICTAWTLFIPRASELVAVTWISSFGSLFHLLSSALSSMGTCPVDSYWTLMNSEEKSSEPLVLCDLWYFIALPSPLVTFYCYLPYIGSCQGPSLSLFSFFFFFFFFLRRRTESCSVAQVGVQWRDLGSLQPPPPGFKRFSCLSLPSSWDYRRAPPRPANFYIFSRDGVSPCWPGWSRTPIS

SEQ ID NO: 13939 - protein, 145 aa, Homo sapiens
CGVGLHDRPWLPRNRCSPASALRSACVVNSPRARGALWPESACASTYPNPRGLSLGAAPTQSAPGPSGLCCSLCVGQPLSCLLWHHPGHSLRAPHSPARLPSCCTQSPGAGAGSDLQGGTPGPAPCSTAAPSGPHAWRWACIHIP

SEQ ID NO: 13940 - protein, 30 aa, Homo sapiens
SFATLLRLVSNSWPQMILLPRSPKVLGLQA

SEQ ID NO: 13941 - protein, 74 aa, Homo sapiens
FFEMESCCDAQARVQWHELSSLKPLLCSPGSRDFSASASQVAGTTGMHRHAQLIFVFRVCVCFGIIVLEKQIKY

SEQ ID NO: 13942 - protein, 128 aa, Homo sapiens
  DOMAIN (31)..(53): Globins profile domain identified by eMATRIX, accession number BL01033A, p-value=5.091e-11, raw score of 16.94
  DOMAIN (8)..(128): Globin domain identified by PFam, accession name globin, E- value=2.3e-22, PFam score of 82.5
  misc_feature (1)...(128): Xaa = X or * as defined in Table 2
ARGEPTMELSHADTTNVKAAWGWVGAHAGEXGADVLVRMVLCLPTIWTYFPYFDLSHGCAQVNGHGKKVADALTNAVVHVDDMPNSLIGLSELHAHXLLVDPVNFKLLNHCLLGTLADHLLDEFTPAV

SEQ ID NO: 13943 - protein, 61 aa, Homo sapiens
EMGKGIDSLFNEIIAENFPGLARDIDIWKLETQGVPNRFNLKRSSQRQMIVKLSKVKNREF

SEQ ID NO: 13944 - protein, 69 aa, Homo sapiens
GEEGRTQKGERNGGGGSERKEGEEHEARRTGRGEGGGGEAKGRPRSARRRGRGSRGSKSQTPSRHLPAH

SEQ ID NO: 13945 - protein, 234 aa, Homo sapiens
FVSVPSVLLGLQFWRSERDTARLQSARWRVERGRLKELLSRQRPRRREEVVVGREVCRTEMEVRASLQKIVSNGDEQLEKAMEEILRDFEKRPSSLLVDCQSSSEISDHSFGDIPASQTNKPSLQLILDPSNTEISTPRPSSPGGLPEEDSVLFNKLTYLGCMKVSSPRNEVEALRAMATMKSSSQYPFPVTLYVPNVPEGSVRHILSLLGGGEDVIASSGVELTVNSHCRHAE

SEQ ID NO: 13946 - protein, 165 aa, Homo sapiens
SFGLQRWRSERDSARLQSARRRVERGRLKELLSRQRPRRREEVVVGREVCRTEMEVRASLQKVSGSSDSVATMNSEEFVLVPQYADDNSTKHEEKPQLKIVSNGDEQLEKAMEEILRDSEKRPSSLLVDCQSSSEISDHSFGDIPASQTNKPSLQLIMDPSNTET

SEQ ID NO: 13947 - protein, 74 aa, Homo sapiens
RRLFFFVVLIDMGFHHVGQAGLKLLSSSDPPTLASQSAEITSMSHRARPQCSPSTLHCIEKLINTLGDKLTYYL

SEQ ID NO: 13948 - protein, 263 aa, Homo sapiens; identical to SEQ ID NO: 13902

SEQ ID NO: 13949 - protein, 2500 aa, Homo sapiens
  DOMAIN (261)..(274): PROTEIN ZINC-FINGER METAL-BINDI domain identified by eMATRIX, accession number PD00066, p-value=9.000e-13, raw score of 13.92
  DOMAIN (243)..(1905): Zinc finger, C2H2 type domain identified by PFam, accession name zf-C2H2, E-value=1.1e-23, PFam score of 92.1
MLFLNLATAHQEIEYISPPLEHGSNQALRSTALETLHESALLSGELALKTLCNKMDTGDTALGQKATSRSGETDKASGRWRQEQSAVIKMSTFGSHEGQRQPQIEPEQIGNTASAQLFGSGKLASPSEVVQQVAEKQYPPHRPSPYSCQHSLSFPQHSLPQGVMHSTKPHQSLEGPPWLFPGPLPSVASEDLFPFPIHGHSGGYPRKKISSLNPAYSQYSQKSIEQAEEAHKKEHKPKKPGKYICPYCSRACAKPSVLKKHIRSHTGERPYPCIPCGFSFKTKSNLYKHRKSHAHAIKAGLVPFTESAVSKLDLEAGFIDVEAEIHSDGEQSTDTDEESSLFAEASDKMSPGPPIPLDIASRGGYHGSLEESLGGPMKVPILIIPKSGIPLPNESSQYIGPDMLPNPSLNTKADDSHTVKQKLALRLSEKKGQDSEPSLNLLSPHSKGSTDSGYFSRSESAEQQISPPNTNAKSYEEIIFGKYCRLSPRNALSVTTTSQERAAMGRKGIMEPLPHVNTRLDVKMFEDPVSQLIPSKGDVDPSQTSMLKSTKFNSESRQPQIIPSSIRNEGKLYPANFQGSNPVLLEAPVDSSPLIRSNSVPTSSATNLTIPPSLRGSHSFDERMTGSDDVFYPGTVGIPPQRMLRRQAAFELPSVQEGHVEVEHHGRMLKGISSSSLKEKKLSPGDRVGYDYDVCRKPYKKWEDSETPKQNYRDISCLSSLKHGGEYFMDPVVPLQGVPSMFGTTCENRKRRKEKSVGDEEDTPMICSSIVSTPVGIMASDYDPKLQMQEGVRSGFAMAGHENLSHGHTERFDPCRPQLQPGSPSLVSEESPSAIDSDKMSDLGGRKPPGNVISVIQHTNSLSRPNSFERSESAELVACTQDKAPSPSETCDSEISEAPVSPEWAPPGDGAESGGKPSPSQQVQQQSYHTQPRLVRQHNIQVPEIRVTEEPDKPEKEKEAQSKEPEKPVEEFQWPQRSETLSQLPAEKLPPKKKRLRLADMEHSSGESSFESTGTGLSRSPSQESNLSHSSSFSMSFEREETSKLSALPKQDEFGKHSEFLTVPAGSYSLSVPGHHHQKEMRRCSSEQMPCPHPAEVPEVRSKSFDYGNLSHAPVSGAAASTVSPSRERKKCFLVRQASFSGSPEISQGEVGMDQSVKQEQLEHLHAGLRSGWHHGPPAVLPPLQQEDPGKQVAGPCPPLSSGPLHLAQPQIMHMDSQESLRNPLIQPTSYMTSKHLPEQPHLFPHQETIPFSPIQNALFQFQYPTVCMVHLPAQQPPWWQAHFPHPFAQHPQKSYGKPSFQTEIHSSYPLEHVAEHTGKKPAEYAHTKEQTYPCYSGASGLHPKNLLPKFPSDQSSKSTETPSEQVLQEDFASANAGSLQSLPGTVVPVRIQTHVPSYGSVMYTSISQILGQNSPAIVICKVDENMTQRTLVTNAAMQGIGFNIAQVLGQHAGLEKYPIWKAPQTLPLGLESSIPLCLPSTSDSVATLGGSKRMLSPASSLELFMETKQQKRVKEEKMYGQIVEELSAVELTNSDIKKDLSRPQKPQLVRQGCASEPKDGLQSGSSSFSSLSPSSSQDYPSVSPSSREPFPPSKEMLSGSRAPLPGQKSSGPSESKESSDELDIDETASDMSMSPQSSSLPAGDGQLEEEGKGHKRPVGMLVRMASAPSGNVADSTLLLTDMADFQQILQFPSLRTTTTVSWCFLNYTKPNYVQQATFKSSVYASWCISSCNPNPSGLNTKTTLALLRSKQKITAEIYTLAAMHRPGTGKLTSSSAWKQFTQMKPDASFLFGSKLERKLVGNILKERGKGDIHGDKDIGSKQTEPIRIKIFEGGYKSNEDYVYVRGRGRGKYICEECGIRCKKPSMLKKHIRTHTDVRPYVCKLCNFAFKTKGNLTKHMKSKAHMKKCLELGVSMTSVDDTETEEAENLEDLHKAAEKHSMSSISTDHQFSDAEESDGEDGDDNDDDDEDEDDFDDQGDLTPKTRSRSTSPQPPRFSSLPVNVGAVPHGVPSDSSLGHSSLISYLVTLPSIRVTQLMTPSDSCEDTQMTEYQRLFQSKSTDSEPDKDRLDIPSCMDEECMLPSEPSSSPRDFSPSSHHSSPGYDSSPCRDNSPKRYLIPKGDLSPRRHLSPRRDLSPMRHLSPTKEAALRREMSQRDVSPRRHLSPRRPVSPGKDITARRDLSPRRERRYMTTIRAPSPRRALYHNPPLSMGQYLQAEPIVLGPPNLRRGLPQVPYFSLYGDQEGAYEHPGSSLFPEGPNDYVFSHLPLHSQQQVRAPIPMVPVGGIQMVHSMPPALSSLHPSPTLPLPMEGFEEKKGASGESFSKDPYVLSKQHEKRGPHALQSSGPPSTPSSPRLLMKQSTSEDSLNATEREQEENIQTCTKAIASLRIATEEAALLGPDQPARVQEPHQNPLGSAHVSIRHFSRPEPGQPCTSATHPDLHDGEKDNFGTSQTPLAHSTFYSKSCVDDKQLDFHSSKELSSSTEESKDPSSEKSQLH

SEQ ID NO: 13950 - protein, 2725 aa, Homo sapiens
  DOMAIN (401)..(414): PROTEIN ZINC-FINGER METAL-BINDI domain identified by eMATRIX, accession number PD00066, p-value=9.000e-13, raw score of 13.92
  DOMAIN (383)..(2045): Zinc finger, C2H2 type domain identified by PFam, accession name zf-C2H2, E-value=1.1e-23, PFam score of 92.1
MKKENVSQGIKTASGSQKRQENDCPLEPLERRQPSSHLAFTPVRAVWGFRHLELMLVRQILVASVSFQCLQTYRSCGNFRVLFPSQSATSVIIIITVKFDVREKIAHGNLHLAFGWTFLQWRELCYSPGPRTLLANAHRLWCACGRFQREGAISKFADTLEHGSNQALRSTALETLHESALLSGELALKTLCNKMDTGDTALGQKATSRSGETDKASGRWRQEQSAVIKMSTFGSHEGQRQPQIEPEQIGNTASAQLFGSGKLASPSEVVQQVAEKQYPPHRPSPYSCQHSLSFPQHSLPQGVMHSTKPHQSLEGPPWLFPGPLPSVASEDLFPFPIHGHSGGYPRKKISSLNPAYSQYSQKSIEQAEEAHKKEHKPKKPGKYICPYCSRACAKPSVLKKHIRSHTGERPYPCIPCGFSFKTKSNLYKHRKSHAHAIKAGLVPFTESAVSKLDLEAGFIDVEAEIHSDGEQSTDTDEESSLFAEASDKMSPGPPIPLDIASRGGYHGSLEESLGGPMKVPILIIPKSGIPLPNESSQYIGPDMLPNPSLNTKADDSHTVKQKLALRLSEKKGQDSEPSLNLLSPHSKGSTDSGYFSRSESAEQQISPPNTNAKSYEEIIFGKYCRLSPRNALSVTTTSQERAAMGRKGIMEPLPHVNTRLDVKMFEDPVSQLIPSKGDVDPSQTSMLKSTKFNSESRQPQIIPSSIRNEGKLYPANFQGSNPVLLEAPVDSSPLIRSNSVPTSSATNLTIPPSLRGSHSFDERMTGSDDVFYPGTVGIPPQRMLRRQAAFELPSVQEGHVEVEHHGRMLKGISSSSLKEKKLSPGDRVGYDYDVCRKPYKKWEDSETPKQNYRDISCLSSLKHGGEYFMDPVVPLQGVPSMFGTTCENRKRRKEKSVGDEEDTPMICSSIVSTPVGIMASDYDPKLQMQEGVRSGFAMAGHENLSHGHTERFDPCRPQLQPGSPSLVSEESPSAIDSDKMSDLGGRKPPGNVISVIQHTNSLSRPNSFERSESAELVACTQDKAPSPSETCDSEISEAPVSPEWAPPGDGAESGGKPSPSQQVQQQSYHTQPRLVRQHNIQVPEIRVTEEPDKPEKEKEAQSKEPEKPVEEFQWPQRSETLSQLPAEKLPPKKKRLRLADMEHSSGESSFESTGTGLSRSPSQESNLSHSSSFSMSFEREETSKLSALPKQDEFGKHSEFLTVPAGSYSLSVPGHHHQKEMRRCSSEQMPCPHPAEVPEVRSKSFDYGNLSHAPVSGAAASTVSPSRERKKCFLVRQASFSGSPEISQGEVGMDQSVKQEQLEHLHAGLRSGWHHGPPAVLPPLQQEDPGKQVAGPCPPLSSGPLHLAQPQIMHMDSQESLRNPLIQPTSYMTSKHLPEQPHLFPHQETIPFSPIQNALFQFQYPTVCMVHLPAQQPPWWQAHFPHPFAQHPQKSYGKPSFQTEIHSSYPLEHVAEHTGKKPAEYAHTKEQTYPCYSGASGLHPKNLLPKFPSDQSSKSTETPSEQVLQEDFASANAGSLQSLPGTVVPVRIQTHVPSYGSVMYTSISQILGQNSPAIVICKVDENMTQRTLVTNAAMQGIGFNIAQVLGQHAGLEKYPIWKAPQTLPLGLESSIPLCLPSTSDSVATLGGSKRMLSPASSLELFMETKQQKRVKEEKMYGQIVEELSAVELTNSDIKKDLSRPQKPQLVRQGCASEPKDGLQSGSSSFSSLSPSSSQDYPSVSPSSREPFPPSKEMLSGSRAPLPGQKSSGPSESKESSDELDIDETASDMSMSPQSSSLPAGDGQLEEEGKGHKRPVGMLVRMASAPSGNVADSTLLLTDMADFQQILQFPSLRTTTTVSWCFLNYTKPNYVQQATFKSSVYASWCISSCNPNPSGLNTKTTLALLRSKQKITAEIYTLAAMHRPGTGKLTSSSAWKQFTQMKPDASFLFGSKLERKLVGNILKERGKGDIHGDKDIGSKQTEPIRIKIFEGGYKSNEDYVYVRGRGRGKYICEECGIRCKKPSMLKKHIRTHTDVRPYVCKLCNFAFKTKGNLTKHMKSKAHMKKCLELGVSMTSVDDTETEEAENLEDLHKAAEKHSMSSISTDHQFSDAEESDGEDGDDNDDDDEDEDDFDDQGDLTPKTRSRSTSPQPPRFSSLPVNVGAVPHGVPSDSSLGHSSLISYLVTLPSIRVTQLMTPSDSCEDTQMTEYQRLFQSKSTDSEPDKDRLDIPSCMDEECMLPSEPSSSPRDFSPSSHHSSPGYDSSPCRDNSPKRYLIPKGDLSPRRHLSPRRDLSPMRHLSPRKEAALRREMSQRDVSPRRHLSPRRPVSPGKDITARRDLSPRRERRYMTTIRAPSPRRALYHNPPLSMGQYLQAEPIVLGPPIVTVGITGLPPKLVFDEGDVPFPNLIKYKGDFVYVQNLNDSHTVKFPPFPAYEVVVTIVLMIAPFHSHFQENPCFQLAYDISQRRNLRRGLPQVPYFSLYGDQEGAYEHPGSSLFPEGPNDYVFSHLPLHSQQQVRAPIPMVPVGGIQMVHSMPPALSSLHPSPTLPLPMEGFEEKKGASGESFSKDPYVLSKQHEKRGPHALQSSGPPSTPSSPRLLMKQSTSEDSLNATEREQEENIQTCTKAIASLRIATEEAALLGPDQPARVQEPHQNPLGSAHVSIRHFSRPEPGQPCTSATHPDLHDGEKDNFGTSQTPLAHSTFYSKSCVDDKQLDFHSSKELSSSTEESKDPSSEKSQLH

SEQ ID NO: 13951 - protein, 197 aa, Homo sapiens
QCGGIRATTMAMSFEWPWQYRFPPFFTLQPNVDTRQKQLAAWCSLVLSFCRLHKQSSMTVMEAQESPLFNNVKLQRELPVESIQIVLEELRKKGNLEWLDKSKSSFLIMWRRPEEWGKLIYQWVSRSGQNNSVFTLYELTNGEDTEDEEFHGLEKPLLLRALQCPYSREHKAEIHHCSGDGRGVQVLLGRDLSPFTS

SEQ ID NO: 13952 - protein, 118 aa, Homo sapiens
SGQNNSVFTLYELTNGEDTEDEEFHGLDEATLLRALQALQQEHKAEIITVKRWPRRSSSSSRDLSPLYFLPPTFPGLSKGDQTPVSPKRLESVTPPELKKDSSPEGWGPWGMGFLKPP

SEQ ID NO: 13953 - protein, 36 aa, Homo sapiens
  misc_feature (1)...(36): Xaa = X or * as defined in Table 2
LLYNIYCGEKKREERKDXPGQHGETPSLQKIQKLAG

SEQ ID NO: 13954 - protein, 40 aa, Homo sapiens
FCNVGQAGLKLLTSSDLPASASQIAGITVVIHHTWLECRF

SEQ ID NO: 13955 - protein, 101 aa, Homo sapiens
  DOMAIN (60)..(74): PROTEIN SH3 DOMAIN REPEAT PRESYNA domain identified by eMATRIX, accession number PD00289, p-value=6.760e-10, raw score of 9.97
  DOMAIN (22)..(96): PDZ domain (Also known as DHR or GLGF) domain identified by PFam, accession name PDZ, E-value=0.042, PFam score of 14.6
APPPCATQTAPHQHGQHSRDALLRFGCHCEILLFSSAGIYVQEMADMSMAKLYSGLLGVGDEILEVNGAKVAGLGLAHIKELLAHSESLSIRVLRQRPVPR

SEQ ID NO: 13956 - protein, 27 aa, Homo sapiens
HSAPRHFHTQTQSLQQSVRYLSLFCLF

SEQ ID NO: 13957 - protein, 27 aa, Homo sapiens
HSAPRHFHTQTQSLQQSVRYLSLFCLF

SEQ ID NO: 13958 - protein, 66 aa, Homo sapiens
  DOMAIN (1)..(58): Ubiquinol-cytochrome C reductase complex 14k domain identified by PFam, accession name UCR_14kD, E-value=0.0009, PFam score of -5.0
RLAESLYDDRMFDIMRALDLTLKHHILPKELRTEYEEEYFYLEPYLKQDIREGIEREEWAKKWSCK

SEQ ID NO: 13959 - protein, 39 aa, Homo sapiens
AVSRPAKAAESRLLTSPESLSRDLDAPEVQESYRQQVPP

SEQ ID NO: 13960 - protein, 1133 aa, Homo sapiens
  DOMAIN (32)..(84): Ubiquitin domain proteins domain identified by eMATRIX, accession number BL00299, p-value=7.000e-24, raw score of 28.84
  DOMAIN (17)..(97): Ubiquitin family domain identified by PFam, accession name ubiquitin, E-value=1.3e-41, PFam score of 133.2
  misc_feature (1)...(1133): Xaa = X or * as defined in Table 2
MEPNDSTSTAVEEPDSLEVLVKTLDSQTRTFIVGAQMNVKEFKEHIRASVSIPSEKQRLIYQGRVLQDDKKLQEYNVGGKVIHLVERAPPQTHLPSGASSGTGSASATHGGGSPPGTRGPGASVHDRNANSYVMVGTFNLPSDGSAVDVHINMEQAPIQSEPRVRLVMAQHMIRDIQTLLSRMETLPYLQCRGGPQPQHSQPPPQPPAVTPEPVALSSQTSEPVESEAPPREPMEAEEVEERAPAQNPELTPGPAPAGPTPAPETNAPNHPSPAEYVEVLQELQRLESRLQPFLQRYYEVLGAAATTDYNNNHEGREEDQRLINLVGESLRLLGNTFVALSDLRCNLACTPPRHLHVVRPMSHYTTPMVLQQAAIPIQINVGTTVTMTGNGTRPPPTPNAEAPPPGPGQASSVAPSSTNVESSAEGAPPPGPAPPPATSHPRVIRISHQSVEPVVMMHMNIQDSGTQPGGVPSAPTGPLGPPGHGQTLGQQVPGFPTAPTRVVIARPTPPQARPSHPGGPPVSGTLQGAGLGTNASLAQMVSGLVGQLLMQPVLVAQGTPGMAPPPAPATASASAGTTNTATTAGPAPGGPAQPPPTPQPSMADLQFSQLLGNLLGPAGPGAGGPGVASPTITVAMPGVPAFLQGMTDFLQATQTAPPPPPPPPPPPPAPEQQTMPPPGSPSGGAGSPGGLGLESLSPEFFTSVVQGVLSSLLGSLGARAGSSESIAAFIQRLSGSSNIFEPGADGALGFFGALLSLLCQNFSMVDVVMLLHGHFQPLQRLQPQLRSFFHQHYLGGQEPTPSNIRMATHTLITGLEEYVRESFSLVQVQPGVDIIRTNLEFLQEQFNSIAAHVLHCTDSGFGARLLELCNQGLFECLALNLHCLGGQQMELAAVINGRIRRMSRGVNPSLVSWLTTMMGLRLQVVLEHMPVGPDAILRYVRRVGDPPQPLPEEPMEVQGAKRASPEPQRENASPAPGTTAEEAMSRGSPLAPEGGSRDEQDGASAETEPWAAAVPPEWVPIIQQDIQSQRKLKPQPPLSDAYLSGMPAKRRKTMPGXGPPSCFSTEAVSRAAKAAGARPLTSPESLSRDLEAPEVQESYRQQLRSDIQKRLQEDPNYSPQRFPNAQRAFADDP

SEQ ID NO: 13961 - protein, 147 aa, Homo sapiens
RKSFQKELGMALLKKDCQGLVVRLIQDFVLLTTAVEVAHRWRELAEKLANVSKQQMDAYESPHRDRNGVVDSEAMRKPAYDFLLTWSHQIGDSYRDVIQELHLGLDNMKNPITKRWKHLTGTLILVNSLDVLRAAAFSPADQDDFEI

SEQ ID NO: 13962 - protein, 59 aa, Homo sapiens
DVWVNESERHQLKTKVVHLSKLPKDTALLLDPNIYRTMPQKRLKRTLIRKVFNLYLSKQ

SEQ ID NO: 13963 - protein, 47 aa, Homo sapiens
EVQEVQGKKVARVANPGLDTFSREIFRNEKLKKCRRFLDELDAVKMD

SEQ ID NO: 13964 - protein, 149 aa, Homo sapiens
  misc_feature (1)...(149): Xaa = X or * as defined in Table 2
VSHSHLSSPQFNSHLNRRPTRIPLSPQPKXGPAYSRPPVWTPAEPEALRWGRHRGPXKARGSRPSSAHSGWRPRGEAPHRTGTAQPPTAVPCRRAHLGEDSTPGPPGALGGVGFPSASPPVPTPTXTQTGRRPETQLRQQTPRGAPPRA

SEQ ID NO: 13965 - protein, 82 aa, Homo sapiens
  DOMAIN (12)..(40): !!!! PROTEIN ALU SUBFAMILY WARNING ENTRY NUCLEAR PHOSPHO domain identified by eMATRIX, accession number PD02454B, p-value= 2.432e-27, raw score of 11.61
  misc_feature (1)...(82): Xaa = X or * as defined in Table 2
SIGRLRRVGHLRSGVRDQPGQHGGTPSLLKIQKFAGHGGAFLYSQVLGRLRQENRLNSRGGGCSESGSQHYTPAWVTEXDSI

SEQ ID NO: 13966 - protein, 354 aa, Homo sapiens
  DOMAIN (78)..(123): RNA polymerases D / 30 to 40 Kd subunits proteins domain identified by eMATRIX, accession number BL00446A, p-value=4.484e- 40, raw score of 18.52
SLVERLKMAASQAVEEMRSRVVLGEFGVRNVHTTDFPGNYSGYDDAWDQDRFEKNFRVDVVHMDENSLEFDMVGIDAAIANAFRRILLAEVPTMAVEKVLVYNNTSIVQDEILAHRLGLIPIHADPRLFEYRNQGDEEGTEIDTLQFRLQVRCTRNPHAAKDSSDPNELYVNHKVYTRHMTWIPLGNQADLFPEGTIRPVHDDILIAQLRPGQEIDLLMHCVKGIGKDHAKFSPVATASYRLLPDITLLEPVEGEAAEELSRCFSPGVIEVQEVQGKKVAQSCPTPRLDTFSREIFRNEKLKKVVRLARVRDHYIFSVESTGVLPPDVLVSEAIKVLMGKCRRFLDELDAVQMD

SEQ ID NO: 13967 - protein, 37 aa, Homo sapiens
  misc_feature (1)...(37): Xaa = X or * as defined in Table 2
WLCYIIYKXYDNWWHSMCFSKPLYPEIVSLNYILLKG

SEQ ID NO: 13968 - protein, 21 aa, Homo sapiens
GHRSDDSSSHGCKANTAPQES

SEQ ID NO: 13969 - protein, 171 aa, Homo sapiens
  DOMAIN (17)..(57): Calponin family repeat proteins domain identified by eMATRIX, accession number BL01052C, p-value=1.000e-40, raw score of 18.51
DGSKPVKVPENPPSMVFKQMEQVAQFLKAAEDYGVIKTDMFQTVDLFEGKDMAAVQRTLMALGSLAVTKNDGHYRGDPNWFMKKAQEHKREFTESQLQEGKHVIGLQMGSSSLCPQPQPNFLPESITALAPPSRLPPSPLLSPPWAKQGRSGLGVAWMWAKSTVLLGAKAH

SEQ ID NO: 13970 - protein, 228 aa, Homo sapiens
  DOMAIN (10)..(42): Calponin family repeat proteins domain identified by eMATRIX, accession number BL01052A, p-value=2.875e-35, raw score of 16.12
  misc_feature (1)...(228): Xaa = X or * as defined in Table 2
GSLLSPDMANKGPSYGMSREVQSKIEKKYDEELEERLVEWIIVQCGPDVGRPDRGRLGFPVWLKNGVILDRLXTTFTPDASKPVKVPEKPPPSCSSSKTEPLPHFLKAAEDYGVRPKSNIFQDLXTSLKGKDMGSSSRGPLMAFGQLWQVTKNDGHYRGDPNWFYERKPQQHKREFHRRAQLQKGKACPLALPDGAANRRGPPQARHXQGYGTTLGQIIKLEAERAKP

SEQ ID NO: 13971 - protein, 279 aa, Homo sapiens
TRAADPARPTRTRTRGRTRGRQHSLKKSRMENDMAQSLHSDTADDTAHRPGKSNLKLPKGILKKKVSASAEGVQEDPPELSPIPASPGQAAPLLPKKGILKKPRQRESGYYSSPEPSESGELLDAGDVFVSGDPKEQKPPQASGLLLHRKGILKLNGMFFQTALELAAPTTFGSLDELAPPRPLARASRPSGAVSEDSILSSESFDQLDLPERLPEPPLRGCVSVDNLTGLEEPPSEGPGSCLRRWRQDPLGDSCFSLTDCQEVTATYRQALRVCSKLT

SEQ ID NO: 13972 - protein, 190 aa, Homo sapiens
  DOMAIN (43)..(53): Protein phosphatase 2C proteins domain identified by eMATRIX, accession number BL01032I, p-value=6.750e-10, raw score of 10.42
  DOMAIN (1)..(47): Protein phosphatase 2C domain identified by PFam, accession name PP2C, E-value=1.2e-12, PFam score of 48.0
CDGIWDVMSNEQLCEYVKSRLEVSDDLENVCNWVVDTCLHKGSRDNMSIVLVCFSNAPKVSDEAVKKDSELDKHLESRVEEIMEKSGEEGMPDLAHVMRILSAENIPNLPPGGGLAGKRNVIEAVYSRLNPHRESDGMAVLGTSICKPAESSGDKKGSGWQTFQALRSTRTKRFFCKPERKINPALYNYK

SEQ ID NO: 13973 - protein, 479 aa, Homo sapiens
  DOMAIN (148)..(188): Protein phosphatase 2C proteins domain identified by eMATRIX, accession number BL01032F, p-value=1.667e-34, raw score of 26.52
  DOMAIN (22)..(288): Protein phosphatase 2C domain identified by PFam, accession name PP2C, E-value=1e-97, PFam score of 338.1
MGAFLDKPKTEKHNAHGAGNGLRYGLSSMQGWRVEMEDAHTAVVGIPHGLEDWSFFAVYDGHAGSRVANYCSTHLLEHITTNEDFRAAGKSGSALELSVENVKNGIRTGFLKIDEYMRNFSDLRNGMDRSGSTAVGVMISPKHIYFINCGDSRAVLYRNGQVCFSTQDHKPCNPREKERIQNAGGSVMIQRVNGSLAVSRALGDYDYKCVDGKGPTEQLVSPEPEVYEILRAEEDEFIILACDGIWDVMSNEELCEYVKSRLEVSDDLENVCNWVVDTCLHKGSRDNMSIVLVCFSNAPKVSDEAVKKDSELDKHLESRVEEIMEKSGEEGMPDLAHVMRILSAENIPNLPPGGGLAGKRNVIEAVYSRLNPHRESDGASDEAEESGSQGKLVEALRQMRINHRGNYRQLLEEMLTSYRLAKVEGEESPAEPAATATSSNSDAGNPVTMQESHTESESGLAELDSSNEDAGTKMSGEKI

SEQ ID NO: 13974 - protein, 94 aa, Homo sapiens
CFSNAPKVSDEAVKKDSELDKHLESRVEEIMEKSGEEGMPDLAHVMRILSAENIPNLPPGGGLAGNRNVIEAVYSRLNPHRESDGGAGDLEDPW

SEQ ID NO: 13975 - protein, 64 aa, Homo sapiens
  misc_feature (1)...(64): Xaa = X or * as defined in Table 2
FYLYLVMLCFIEPVKLLLIVGAYILXLLKTIHEFHNQCFVDTKSLKGRHFKEYVFFTFLNMFHR

SEQ ID NO: 13976 - protein, 143 aa, Homo sapiens; identical to SEQ ID NO: 8541
  DOMAIN (21)..(43): Globins profile domain identified by eMATRIX, accession number BL01033A, p-value=2.929e-17, raw score of 16.94
  DOMAIN (10)..(143): Globin domain identified by PFam, accession name globin, E- value=4.3e-55, PFam score of 196.4

SEQ ID NO: 13977 - protein, 227 aa, Homo sapiens
KTGREPRGRFLLCLLFFTVITYFFVVIGIAPIFILYELDSPLCWNEVFIGYGSALGSASFLTSFLGIWLFSYCMEDIHMAFIGIFTTMTGMAMTAFASTTLMMFLARVPFLFTIVPFSVLRSMLSKVVRSTEQGTLFACIAFLETLGGVTAVSTFNGIYSATVAWYPGFTFLLSAGLLTNFQPSVYVLSSVPAGMREAMNFLYKKNPVKMLQTEPVKLLLIVGAYIL

SEQ ID NO: 13978 - protein, 91 aa, Homo sapiens
ELLVSPFLHPIIPPICGCFPRPPPKIDISYPVPLCDPRTQVSDCEQMWPCPETPAWPEGHASAYYFISPGSLPAVPRVSSSPTLGTRDATT

SEQ ID NO: 13979 - protein, 229 aa, Homo sapiens
PTRPVFDQVRTLVLCECAHADRSGGAPSLCPHAAEPRGSPAPQACGSAAKCVRCASWVLLCALSYGDTGGVGLDRYRSDYGDTGGVRLDRYRSDYGGTGGVGLDRYRSDYGGTGGVGLDRYRSDYGGTSGRGVDKVPVRLRWHRRRGVRQVLVRCTGSLNPCCGFGSKDRTHPCHKRSTGRGVGVGAALRVSRPQPHSHSSLGRKGRVPGVSWWVSQGAAPPWEVTGQE

SEQ ID NO: 13980 - protein, 39 aa, Homo sapiens
GTRSYTHLYRVFLELIKMSVYDLNHTVIMVISGHVRLAF

SEQ ID NO: 13981 - protein, 113 aa, Homo sapiens
GTRKFIPLTAWSNWAIVKAASEPFQSENEAYPPAERISAEEGGDAAEGGEDSEEDFEENTDKPGDELISFEEHVGPSAAPKIEKPYMPRCLKQRRALRSSRLLIGIIRSGRLQ

SEQ ID NO: 13982 - protein, 155 aa, Homo sapiens
HERLEKNVKEVLEDFAEDGEKKIKLLTGKRVQLAEDLTRTQHYTPGHHMAPHPALTLLLPCLGSDIRARLLFVMESLLLSSALTLCARVPLHLHPSHPLSLCPTPDRFLSSPGSQTMAFVGDTLFTLPVLRQPAPGHPPAQILSSVLDQATNSPM

SEQ ID NO: 13983 - protein, 978 aa, Homo sapiens
  DOMAIN (306)..(325): DYNAMIN SIGNATURE domain identified by eMATRIX, accession number PR00195A, p-value=8.627e-16, raw score of 11.94
  DOMAIN (280)..(495): Dynamin family domain identified by PFam, accession name dynamin, E-value=4.2e-16, PFam score of 66.9
TGAPAWPSRRLRDLPAGGMWRLRRAAVACEVCQSLVKHSSGIKGSLPLQKLHLVSRSIYHSHHPTLKLQRPQLRTSFQQFSSLTNLPLRKLKFSPIKYGYQPRRNFWPARLATRLLKLRYLILGSAVGGGYTAKKTFDQWKDMIPDLSEYKWIVPDIVWEIDEYIDFEKIRKALPNSEDLVKLAPDFDKIVESLSLLKDFFTSGSPEETAFRATDRGSESDKHFRKVSDKEKIDQLQEELLHTQLKYQRILERLEKENKELRKLVLQKDDKGIHHRKLKKSLIDMYSEVLDVLSDYDASYNTQDHLPRVVVVGDQSAGKTSVLEMIAQARIFPRGSGEMMTRSPVKVTLSEGPHHVALFKDSSREFDLTKEEDLAALRHEIELRMRKNVKEGCTVSPETISLNVKGPGLQRMVLVDLPGVINTVTSGMAPDTKETIFSISKAYMQNPNAIILCIQDGSVDAERSIVTDLVSQMDPHGRRTIFVLTKVDLAEKNVASPSRIQQIIEGKLFPMKALGYFAVVTGKGNSSESIEAIREYEEEFFQNSKLLKTSMLKAHQVTTRNLSLAVSDCFWKMVRESVEQQADSFKATRFNLETEWKNNYPRLRELDRNELFEKAKNEILDEVISLSQVTPKHWEEILQQSLWERVSTHVIENIYLPAAQTMNSGTFNTTVDIKLKQWTDKQLPNKAVEVAWETLQEEFSRFMTEPKGKEHDDIFDKLKEAVKEESIKRHKWNDFAEDSLRVIQHNALEDRSISDKQQWDAAIYFMEEALQARLKDTENAIENMVGPDWKKRWLYWKNRTQEQCVHNETKNELEKMLKCNEEHPAYLASDEITTVRKNLESRGVEVDPSLIKDTWHQVYRRHFLKTALNHCNLCRRGFYYYQRHFVDSELECNDVVLFWRIQRMLAITANTLRQQLTNTEVRRLEKNVKEVLEDFAEDGEKKIKLLTGKRVQLAEDLKKVREIQEKLDAFIEALHQEK

SEQ ID NO: 13984 - protein, 107 aa, Homo sapiens
PVIDEILKFREVWKSFDRAVGPEWFPYAKAARHPFSSKITATTFLHLASAALYRTAETSSTMQNYHQDWPTPGGIPETTLQGAYRKKIKRSDAAAAGTHSSPWCIPL

SEQ ID NO: 13985 - protein, 53 aa, Homo sapiens
KPRSGASGAGWLPRGETKSLMCPPSGGCEIVEAWLRADRYAFWDVPLDSPPLA

SEQ ID NO: 13986 - protein, 336 aa, Homo sapiens
ASGEWRVSGGRPAGAGRPEEALAAGSDPRGAAARLACSAPTPGGGTMPFDFRRFDIYRKVPKDLTQPTYTGAIISICCCLFILFLFLSELTGFITTEVVNELYVDDPDKDSGGKIDVSLNISLPNLHCELVGLDIQDEMGRHEVGHIDNSMKIPLNNGAGCRFEGQFSINKVPGNFHVSTHSATAQPQNPDMTHVIHKLSFGDTLQVQNIHGAFNALGGADRLTSNPLASHDYILKIVPTVYEDKSGKQRYSYQYTVANKEYVAYSHTGRIIPAIWFRYDLSPITVKYTERRQPLYRFITTICAIIGGTFTVAGILDSCIFTASEAWKKIQLGKMH

SEQ ID NO: 13987 - protein, 130 aa, Homo sapiens
MGLPKTGHQQHFPQELESSSRIPHAGLSQVQVHFRLGQRCPLRSSQVLLWHLPRKVSTFLPCALTLGVAHGWQRQRTGCQSCQRTSGSMGRQPGAFPGFLLQHLSTFTLPHRLCDSSLVLLCEMTHGRLD

SEQ ID NO: 13988 - protein, 62 aa, Homo sapiens
KPRSGASGAGWLPRGETKSLMCPPSGGCEIVEAWLRADRYAFWDVPLREETELSRRVPRSGL

SEQ ID NO: 13989 - protein, 358 aa, Homo sapiens
MSLCAQPSPPVLRGSYTCLSPSVNELYVDDPDKDSGGKIDVSLNISLPNLHCELVGLDIQDEMGRHEVGHIDNSMKIPLNNGAGCRFEGQFSINKNQELQILSQVGERSALGRAEAPGGSWQGFAQHVPAFLEARYCHSGASQQRCEAAPFDRKLTSSQMSEFACFEQQRQPHQRPHGDLVSSASPAGGGQDGVPGNFHVSTHIATAQPQIPDMTHVIHKLSFGDTLQVQNIHGAFNALGGADRLTSNPLASHDYILKIVPTVYEDKSGKHRDSYQYTVANKEYVAYSHTGRIIPAIWFRYDLSPITVKYTERRQPLYRFITTICAIIGGTFTVAGILDSCIFTASEAWKKIQLGKMH

SEQ ID NO: 13990 - protein, 22 aa, Homo sapiens
MLPILRHTFLRVTLRGKKACLL

SEQ ID NO: 13991 - protein, 64 aa, Homo sapiens
YKSKLMITNLCLDNSRLGVVAHTYNPSTLEGPRQGDSLSPRGVQTSLGNIARSCLYPKNIFFLN

SEQ ID NO: 13992 - protein, 144 aa, Homo sapiens
  DOMAIN (48)..(67): Src homology 3 (SH3) domain proteins profile domain identified by eMATRIX, accession number BL50002A, p-value=4.750e- 12, raw score of 14.19
  DOMAIN (44)..(98): SH3 domain identified by PFam, accession name SH3, E-value= 1.7e-11, PFam score of 51.6
FRYSRGGSMEDYCDSPHGETTSVEDSTQDVTAEHHTSDDECEPIEAIAKFDYVGRTARELSFKKGASLLLYQRASDDWWEGRHNGIDGLIPHQYIVVQDTEDGVVERSSPKSEIEVISEPPEEKVTARAGANCPSGGHVADIYL

SEQ ID NO: 13993 - protein, 70 aa, Homo sapiens
RCFLCCCCFPSSLPACPFSPSEDGVVERSSPKSEIEVISEPPEEKVTARAGASCPSGGHVADIYLANINK

SEQ ID NO: 13994 - protein, 75 aa, Homo sapiens
FGFLVETGFLQVGQACLELLTSGDSPAPASQNGGITGRSHRAGPTIFLKKPFKNLHSLCSSNYSIIGSFVNSNTY

SEQ ID NO: 13995 - protein, 91 aa, Homo sapiens
  misc_feature (1)...(91): Xaa = X or * as defined in Table 2
MPVLLTSDEMHKSSVKAGFAKVDQQQAPKSVQLLTVKTRDSTSNRGNSGPRSQATDRICRTPYHFEDCXSGSTASPQVSSASDSEDKRLNK

SEQ ID NO: 13996 - protein, 120 aa, Homo sapiens
GSCSVAQAGVQWCDLSSLQLLPPGSSSSPASACQIAGITGVYHHSQLIFVFLVEMGFYHVGQAGLELLASGDPPALASQSAEITGVNYRAWPHVLYFFQVILKSTTRNVGMGFGMYNGNR

SEQ ID NO: 13997 - protein, 65 aa, Homo sapiens
QAGVQWLVLSSLQTLPPRFKPFSCLRLPSSWDYRCLPPCLAKFCIFSRDGVSSCWPGWSQTPDVR

SEQ ID NO: 13998 - protein, 418 aa, Homo sapiens; identical to SEQ ID NO: 8354
  DOMAIN (90)..(122): GTP-binding elongation factors proteins domain identified by eMATRIX, accession number BL00301B, p-value=5.500e-31, raw score of 20.09
  DOMAIN (5)..(373): Elongation factor Tu family domain identified by PFam, accession name GTP_EFTU, E-value=5.6e-138, PFam score of 467.7

SEQ ID NO: 13999 - protein, 140 aa, Homo sapiens
NGMLGNMLKSSLIFKEDLQETAMETWSIDQVCSWLEEKNLRELVYRFQEEKLSGAALLALNDRMVQQLVKKIGHHAVLMDLIKKYKHNTQGLKSPENPKKAAVVMQTEAARDYRDEESSSPARHGEQMPSFYPAENLDNG

SEQ ID NO: 14000 - protein, 86 aa, Homo sapiens
  DOMAIN (14)..(42): !!!! PROTEIN ALU SUBFAMILY WARNING ENTRY NUCLEAR PHOSPHO domain identified by eMATRIX, accession number PD02454B, p-value= 7.300e-20, raw score of 11.61
SQHFGRSRWVDHLRSGVRDQPGQHGETPSLLKMQKFSQAWCWDYRHITPHPANSCIFVEMGFRYVAQTGFKHLASSDPPASVSQML

SEQ ID NO: 14001 - protein, 222 aa, Homo sapiens
  DOMAIN (11)..(64): Phosphoglycerate mutase family domain identified by PFam, accession name PGAM, E-value=0.0041, PFam score of 15.4
RSRGIKDFENDPPLSSCGIFQSRIAGDALLDSGIRISSVFASPALRCVQTAKLILEELKLEKKIKIRVEPGIFEWTKWEAGKTTPTLMSLEELKEANFNIDTDYRPAFPLSALMPAESYQEYMDRCTASMVQIVNTCPQDTGVILIVSHGSTLDSCTRPLLGLPPRECGDFAQLVRKIPSLGMCFCEENKEEGKWELVNPPVKTLTHGANAAFNWRNWISGN

SEQ ID NO: 14002 - protein, 57 aa, Homo sapiens
  DOMAIN (3)..(55): Mitochondrial carrier proteins domain identified by PFam, accession name mito_carr, E-value=2.2e-12, PFam score of 45.3
GEEGTKYRSFFQTLSLLVQEEGYGSLYRGLTTHLVRQIPNTAIMMATYELVVYLLNG

SEQ ID NO: 14003 - protein, 263 aa, Homo sapiens; identical to SEQ ID NO: 13902

SEQ ID NO: 14004 - protein, 119 aa, Homo sapiens
FFFFFFFFLRQSLSLSPRLECRGTISAHCNLRLLGSINSSASASQVAGTTGACHHVQPIVFVFLGETGFHHVGQAGLKLLTSSDPPASASQRVRITGMSHQIWPKLSLIKSLSDAQIRE

SEQ ID NO: 14005 - protein, 125 aa, Homo sapiens
SCERFSTSQVLCSQALSSGKHYWEVDTRNCSHWAVGVASWEMSRDQVLGRTMDSWCVEWKGTSQLSAWHMVKETVLGSDRPGVVGIWLTLAEGKLACDTEDDQDMLLSGVPHLSSYLGSCIGMHV

SEQ ID NO: 14006 - protein, 85 aa, Homo sapiens
EIFGEQAVLRGSPGGPKDPGSFQCRLPVLQTWGGLRHDALDHAYGMPGGICVHASGYIGGHRTREGALSMARATLAQRSYLPQIC

SEQ ID NO: 14007 - protein, 54 aa, Homo sapiens
RAKAKRRNTTVSCRMRHLKIVYRRFRYRLYVGIIIGPGGLNETLVFTCKKITVP

SEQ ID NO: 14008 - protein, 39 aa, Homo sapiens
  DOMAIN (1)..(34): Cullin family domain identified by PFam, accession name Cullin, E-value=2.6e-11, PFam score of 50.9
RIMKMRKVLKHHQLLGEVLTQLSSRFKPRVPVIKVQDFT

SEQ ID NO: 14009 - protein, 307 aa, Homo sapiens; identical to SEQ ID NO: 8355
  DOMAIN (12)..(44): GTP-binding elongation factors proteins domain identified by eMATRIX, accession number BL00301B, p-value=5.500e-31, raw score of 20.09
  DOMAIN (1)..(251): Elongation factor Tu family domain identified by PFam, accession name GTP_EFTU, E-value=2.2e-67, PFam score of 229.8

SEQ ID NO: 14010 - protein, 790 aa, Homo sapiens
  DOMAIN (755)..(790): Cullin family proteins domain identified by eMATRIX, accession number BL01256E, p-value=5.320e-30, raw score of 24.38
  DOMAIN (29)..(790): Cullin family domain identified by PFam, accession name Cullin, E-value=0, PFam score of 1462.2
IRIAALDDFRTSLTMSSTRSQNPHGLKQIGLDQIWDDLRAGIQQVYTRQSMAKSRYMELYTHVYNYCTSVHQSNQARGAGVPPSKSKKGQTPGGAQFVGLELYKRLKEFLKNYLTNLLKDGEDLMDESVLKFYTQQWEDYRFSSKVLNGICAYLNRHWVRRECDEGRKGIYEIYSLALVTWRDCLFRPLNKQVTNAVLKLIEKERNGETINTRLISGVVQSYVELGLNEDDAFAKGPTLTVYKESFESQFLADTERFYTRESTEFLQQNPVTEYMKKAEARLLEEQRRVQVYLHESTQDELARKCEQVLIEKHLEIFHTEFQNLLDADKNEDLGRMYNLVSRIQDGLGELKKLLETHIHNQGLAAIEKCGEAALNDPKMYVQTVLDVHKKYNALVMSAFNNDAGFVAALDKACGRFINNNAVTKMAQSSSKSPELLARYCDSLLKKSSKNPEEAELEDTLNQVMVVFKYIEDKDVFQKFYAKMLAKRLVHQNSASDDAEASMISKLKQACGFEYTSKLQRMFQDIGVSKDLNEQFKKHLTNSEPLDLDFSIQVLSSGSWPFQQSCTFALPSELERSYQRFTAFYASRHSGRKLTWLYQLSKGELVTNCFKNRYTLQASTFQMAILLQYNTEDAYTVQQLTDSTQIKMDILAQVLQILLKSKLLVLEDENANVDEVELKPDTLIKLYLGYKNKKLRVNINVPMKTEQKQEQETTHKNIEEDRKLLIQAAIVRIMKMRKVLKHQQLLGEVLTQLSSRFKPRVPVIKKCIDILIEKEYLERVDGEKDTYSYLA

SEQ ID NO: 14011 - protein, 788 aa, Homo sapiens
  DOMAIN (731)..(766): Cullin family proteins domain identified by eMATRIX, accession number BL01256E, p-value=5.320e-30, raw score of 24.38
  DOMAIN (29)..(769): Cullin family domain identified by PFam, accession name Cullin, E-value=0, PFam score of 1422.6
IRIAALDDFRTSLTMSSTRSQNPHGLKQIGLDQIWDDLRAGIQQVYTRQSMAKSRYMELYTHVYNYCTSVHQFVGLELYKRLKEFLKNYLTNLLKDGEDLMDESVLKFYTQQWEDYRFSSKVLNGICAYLNRHWVRRECDEGRKGIYEIYSLALVTWRDCLFRPLNKQVTNAVLKLIEKERNGETINTRLISGVVQSYVELGLNEDDAFAKGPTLTVYKESFESQFLADTERFYTRESTEFLQQNPVTEYMKKAEARLLEEQRRVQVYLHESTQDELARKCEQVLIEKHLEIFHTEFQNLLDADKNEDLGRMYNLVSRIQDGLGELKKLLETHIHNQGLAAIEKCGEAALNDPKMYVQTVLDVHKKYNALVMSAFNNDAGFVAALDKACGRFINNNAVTKMAQSSSKSPELLARYCDSLLKKSSKNPEEAELEDTLNQVMVVFKYIEDKDVFQKFYAKMLAKRLVHQNSASDDAEASMISKLKQACGFEYTSKLQRMFQDIGVSKDLNEQFKKHLTNSEPLDLDFSIQVLSSGSWPFQQSCTFALPSELERSYQRFTAFYASRHSGRKLTWLYQLSKGELVTNCFKNRYTLQASTFQMAILLQYNTEDAYTVQQLTDSTQIKMDILAQVLQILLKSKLLVLEDENANVDEVELKPDTLIKLYLGYKNKKLRVNINVPMKTEQKQEQETTHKNIEEDRKLLIQAAIVRIMKMRKVLKHQQLLGEVLTQLSSRFKPRVPVIKKCIDILIEKEYLERVDGEKDTYSYLALTLSGKGLDLCDPQQIVHVGKE

SEQ ID NO: 14012 - protein, 104 aa, Homo sapiens
EHNTPLTSGFVFQEWALTNYYSVKHMDLCLTVVDRAPGSLIKLQGCRENDSRQKWEQIEGNSKLRHVGSNLCLDSRTAKSGGLSVEVSGPALSQQWKFTLNLQQ

SEQ ID NO: 14013 - protein, 52 aa, Homo sapiens
PPAVVPHEDRRFSPHFLDWAAFGVMTLPSIGIPLLLWYSSKRKYDTPKTKKN

SEQ ID NO: 14014 - protein, 233 aa, Homo sapiens
LSSCLCGSGKAFGMPTMRLLSFVVLALFAVTQAEEGARLLVSKSLLNRYAVEGRDLTLQYNIYNVGSSAALDVELSDDSFPPEDFGIVSGMLNVKWDRIAPASNVSHTVVLRPLKAGYFNFTSATITYLAQEDGPVVIGSTSAPGQGGMLVQREFDRRFSPHFLDWAAFGGHDPFPPSGIPLLLWYSSKRKYDTPKTKKNLIWGFHKPSSPKKSKAPLPKKPQVLSQTPKGYP

SEQ ID NO: 14015 - protein, 132 aa, Homo sapiens
  DOMAIN (64)..(110): DEAD-box subfamily ATP-dependent helicases proteins domain identified by eMATRIX, accession number BL00039D, p-value=5.000e- 26, raw score of 21.67
  DOMAIN (23)..(106): Helicases conserved C-terminal domain identified by PFam, accession name helicase_C, E-value=7.5e-10, PFam score of 46.2
GDDETKLTLHGLQQYYVKLKDDEKNRKLFDLLDVLEFNQVVIFVKSVQRCIALAQQFKDFQRRILVATNLFGRGMDIERVNIAFNYDMPEDSDTYLHRVARAGRFGTKGLAITFVSDENDAKILNDVQDRFE

SEQ ID NO: 14016 - protein, 453 aa, Homo sapiens
  DOMAIN (340)..(386): DEAD-box subfamily ATP-dependent helicases proteins domain identified by eMATRIX, accession number BL00039D, p-value=5.000e- 26, raw score of 21.67
  DOMAIN (58)..(250): DEAD/DEAH box helicase domain identified by PFam, accession name DEAD, E-value=2.8e-52, PFam score of 168.3
MAENDVDNELLDYEDDEVETAAGGDGAEAPAKKDVKGSYVSIHSSGFRDFLLKPELLRAIVDCGFEHPSEVQHECIPQAILGMDVLCQAKSGMGKTAVFVLATLQQLEPVTGQVSVLVMCHTRELAFQISKEYERFSKYMPNVKVAVFFGGLSIKKDEEVLKKNCPHIVVGTPGRILALARNKSLNLKHIKHFILDECDKMLEQLDMRRDVQEIFRMTPHEKQVMMFSATLSKEIRPVCRKFMQDPMEIFVDDETKLTLHGLQQYYVKLKDNEKNRKLFDLLDVLEFNQVVIFVKSVQRCIALAQLLVEQNFPAIAIHRGMPQEERLSRYQQFKDFQRRILVATNLFGRGMDIERVNIAFNYDMPEDSDTYLHRVARAGRFGTKGLAITFVSDENDAKILNDVQDRFEVNISELPDEIGHLLPTLEQDTVEDSPILGMLTVCSFQGGGTPGWG

SEQ ID NO: 14017 - protein, 46 aa, Homo sapiens
AGSELGEGEEEVGLSYLDERTNSEEGGLRGEKRKRDAENDGEEEDE

SEQ ID NO: 14018 - protein, 126 aa, Homo sapiens
SYLMKEEIQDEEDDDDYVEEGEEEEEEEEGGLRGEKRKRDAVKEEIQDEEDDDDYVEEGEEEEEEEEGGLRGEKRKRDAVKEEIQDEEDDDDYVEEGEEEEEDEEGGLRGEKRKRDAEDDGEEEDD

SEQ ID NO: 14019 - protein, 93 aa, Homo sapiens
KVNFLKKYSWYRIFSKPLSEQEKKLQNSEQAPGKIIFDQLVVTYNMLQKGPDENRGALGPGGDQPRNTPVPSRPGSLELSSPIKLMVAPRKKG

SEQ ID NO: 14020 - protein, 314 aa, Homo sapiens
  DOMAIN (273)..(287): GTP-binding elongation factors proteins domain identified by eMATRIX, accession number BL00301C, p-value=1.000e-10, raw score of 11.73
  DOMAIN (80)..(269): Elongation factor Tu family domain identified by PFam, accession name GTP_EFTU, E-value=1.4e-58, PFam score of 200.0
  misc_feature (1)...(314): Xaa = X or * as defined in Table 2
SRASSSVVPLALPSLQVTFHPLNEGTLAVASSMLSSFQPEIGTNATVLGLXPIFLMXVLTSLTISSYLFWLRGWLSGTTLLEALDCILPPTRPTDKPLGLPLQDVYKIGGIGTVPVGRVETGVLKPGMVVTFGPVNVTTEVKSVEMHHEALGEALPGDNVGFNVKNVSVKDVRRGNVAGDSKNDPPMEAAGFPAQVIILNHPGQISAGYAPVLDCHTAHIACKFAELKEKIDRRSGKKLEDGPKFLKSGDAAIVDMVPGKPMCVESFSDYPPLGCFAVRDMRQTVAVGVIKAVDKKAAGAGKVTKSAQKAQKAK

SEQ ID NO: 14021 - protein, 121 aa, Homo sapiens
  misc_feature (1)...(121): Xaa = X or * as defined in Table 2
RHRVSLYPSEWSAVAQTHSSLXPXAPWELKXSFXLSLPSSXKXRSIQLCPGXLRNFFFFCGRDGVLMLSMLVFNSWTQVMLLPQPPQVLGLRVELDDTFLKVSSLVLFCLKQGYKKRIWNP

SEQ ID NO: 14022 - protein, 86 aa, Homo sapiens
  DOMAIN (5)..(51): DEAD-box subfamily ATP-dependent helicases proteins domain identified by eMATRIX, accession number BL00039D, p-value=1.947e- 30, raw score of 21.67
  DOMAIN (1)..(47): Helicases conserved C-terminal domain identified by PFam, accession name helicase_C, E-value=0.0051, PFam score of 14.7
KMHARDFTVSALARGIDVQQVSLVINYDLPTNRENYIHRIGRGGRFGRKGVAINFVTEEDKRILRDIETFYNTTVEEMPMNVADLI

SEQ ID NO: 14023 - protein, 35 aa, Homo sapiens
MLPSIQITVEKRMNVFQYSQDAGFSPVNIVFTIGR

SEQ ID NO: 14024 - protein, 320 aa, Homo sapiens
  DOMAIN (239)..(285): DEAD-box subfamily ATP-dependent helicases proteins domain identified by eMATRIX, accession number BL00039D, p-value=1.000e- 40, raw score of 21.67
  DOMAIN (200)..(281): Helicases conserved C-terminal domain identified by PFam, accession name helicase_C, E-value=1.4e-34, PFam score of 128.3
RSLSFVASMLTVLRSLPLFSRELLFPVLKIQKVILALGDYMGATCHACICGTNVRNEMQKLQAEAPHIVVGTPGRVFDMLNRRYLSPKWIKMFVLDEADEMLSRGFKDQIYEIFQKLNTSIQVVLLSATMPTDVLEVTKKFMRDPIRILVKKEELTLEGIKQFYINVEREEWKLDTLCDLYETLTITQAVIFLNTRRKVDWLTEKMHARDFTVSALHGDMDQKERDVIMREFRSGSSRVLITTDLLARGIDVQQVSLVINYDLPTNRENYIHRIGRGGRFGRKGVAINFVTEEDKRILRDIETFYNTTVEEMPMNVADLI

SEQ ID NO: 14025 - protein, 297 aa, Homo sapiens
  DOMAIN (216)..(262): DEAD-box subfamily ATP-dependent helicases proteins domain identified by eMATRIX, accession number BL00039D, p-value=1.000e- 40, raw score of 21.67
  DOMAIN (177)..(258): Helicases conserved C-terminal domain identified by PFam, accession name helicase_C, E-value=1.4e-34, PFam score of 128.3
MDPDGVIESNWNEIVDNFDDMNLKESLLRGIYAYGFEKPSAIQQRAIIPCIKGYDVIAQAQSGTGKTATFAISILQQLEIEFKETQALVLAPTRELAQQVVLLSATMPTDVLEVTKKFMRDPIRILVKKEELTLEGIKQFYINVEREEWKLDTLCDLYETLTITQAVIFLNTRRKVDWLTEKMHARDFTVSALHGDMDQKERDVIMREFRSGSSRVLITTDLLARGIDVQQVSLVINYDLPTNRENYIHRIGRGGRFGRKGVAINFVTEEDKRILRDIETFYNTTVEEMPMNVADLI

SEQ ID NO: 14026 - protein, 34 aa, Homo sapiens
LITTDLLARGIDVQQVSLVINYDLPTNRENYIHR

SEQ ID NO: 14027 - protein, 109 aa, Homo sapiens
  DOMAIN (55)..(63): Helicases conserved C-terminal domain proteins domain identified by eMATRIX, accession number PF00271, p-value=1.000e-08, raw score of 7.99
HGTRRRRDVIMREFRSRVKVRVLITTDLLGSRGLMCNNVSLVINYMDLPTNRENYIHRIGRGGSNLGGKGVAINFCYLKKTRGFLRDIETFLPILQWRRMPMKCGLTLF

SEQ ID NO: 14028 - protein, 238 aa, Homo sapiens
  DOMAIN (170)..(188): Immunoglobulins and major histocompatibility complex proteins domain identified by eMATRIX, accession number BL00290B, p-value= 9.308e-15, raw score of 13.17
  DOMAIN (17)..(118): Class II histocompatibility antigen, alp domain identified by PFam, accession name MHC_II_alpha, E-value=3.6e-67, PFam score of 236.6
TPKRAPKKKMAISGVPVLGFFIIAVLMSAQESWAIKEEHVIIQAEFYLNPDQSGEFMFDFDGDEIFHVDMAKKETVWRLEEFGRFASFEAQGALANIAVDKANLEIMTKRSNYTPITNDKFTPPVVNVTWLRNGKPVTTGVSETVFLPREDHLFRKFHYLPFLPSTEDVYDCRVEHWGLDEPLLKHWEFDAPSPLPETTENVVCALGLTVGLVGIIIGTIFIIKGLRKSNAAERRGPL

SEQ ID NO: 14029 - protein, 275 aa, Homo sapiens
  DOMAIN (150)..(173): Immunoglobulins and major histocompatibility complex proteins domain identified by eMATRIX, accession number BL00290A, p-value= 6.684e-13, raw score of 20.89
  DOMAIN (29)..(130): Class II histocompatibility antigen, alp domain identified by PFam, accession name MHC_II_alpha, E-value=3.6e-67, PFam score of 236.6
FLSVLPHSRALLTPKRAPKKKMAISGVPVLGFFIIAVLMSAQESWAIKEEHVIIQAEFYLNPDQSGEFMFDFDGDEIFHVDMAKKETVWRLEEFGRFASFEAQGALANIAVDKANLEIMTKRSNYTPITNVPPEVTVLTNSPVELREPNVLICFIDKFTPPVVNVTWLRNGKPVTTGVSETVFLPRENTLFRKFHYFPFLPPTEDVYDFRVEHWGLDEPLLKHWEFDAPSPLPKTTENVVCALGLTVGLVGIIIGTIFIIKGIRKSNAAERRGPL

SEQ ID NO: 14030 - protein, 87 aa, Homo sapiens
  misc_feature (1)...(87): Xaa = X or * as defined in Table 2
PTQGQRKGTSHLGGGADAGCTAAEEPGGTAAASGAGAGRAGDXHPGTGAQHHHPPAVPGEAPGEETQGQVQEEPAEAQGWQPHQPPF

SEQ ID NO: 14031 - protein, 445 aa, Homo sapiens
  DOMAIN (103)..(156): Death effector domain proteins domain identified by eMATRIX, accession number PF01335A, p-value=1.284e-11, raw score of 25.98
  DOMAIN (1)..(176): Death effector domain identified by PFam, accession name DED, E-value=9.2e-70, PFam score of 245.2
MSAEVIHQVEEALDTDEKEMLLFLCRDVAIDVVPPNVRDLLDILRERGKLSVGDLAELLYRVRRFDLLKRILKMDRKAVETHLLRNPHLVSDYRVLMAEIGEDLDKSDVSSLIFLMKDYMGRGKISKEKSFLDLVVELEKLNLVAPDQLDLLEKCLKNIHRIDLKTKIQKYKQSVQGAGTSYRNVLQAAIQKSLKDPSNNFRSIPEERYKMKSKPLGICLIIDCIGNETELLRDTFTSLGYEVQKFLHLSMHGISQILGQFACMPEHRDYDSFVCVLVSRGGSQSVYGVDQTHSGLPLHHIRRMFMGDSCPYLAGKPKMFFIQNYVVSEGQLEDSSLLEVDGPAMKNVEFKAQKRGLCTVHREADFFWSLCTADMSLLEQSHSSPSLYLQCLSQKLRQERKRPLLDLHIELNGYMYDWNSRVSAKEKYYVWLQHTLRKKLILSYT

SEQ ID NO: 14032 - protein, 229 aa, Homo sapiens
  DOMAIN (171)..(204): TPR Domain domain identified by PFam, accession name TPR, E- value=4.6e-05, PFam score of 30.2
CISTSTGSDNMQVRKGTEGPKIPPWREREERGGGLVASAYQKDPLVHQKIVVLGEQELPSGVSSLLLLLTWLSALQPVKPDSFLTYKIETVIVPTLEYSEDYISNTCKTMRPASVQGKHSTNIGHDGDDDDEDDDEEMMIASACLLQAELVNYERVKEYCLKVLKKEGENFKALYRSGVAFYHLGDYDKALYYLKEARTQQPTDTNVIRYIQLTEMKLSRCSQREKEAM

SEQ ID NO: 14033 - protein, 336 aa, Homo sapiens
  DOMAIN (28)..(60): Sodium:alanine symporter family proteins domain identified by eMATRIX, accession number BL00873C, p-value=3.273e-10, raw score of 13.14
  DOMAIN (171)..(311): TPR Domain domain identified by PFam, accession name TPR, E- value=0.0015, PFam score of 25.2
SGPRSPRSASPGPASTGPRHPQVAEGGGRERAARSREAGEGPASEAAAAAAGAASGSSGENGSAGRQTAAGCHGRHEACEARGRRPRLLNPGRRGGGGGGGQIAARTRRRGGGRMERKGSAAGAKGNPSPPAAGEGQRPPPPLCVPGGGGGAPARGQVGAAAEPAELIRRAHEFKSQGAQCYKDKKFREAIGKYHRALLELKGLLPPPGERERDSRAASPAGALKPGRLSEEQSKTVEAIEIDCYNSLAACLLQAELVNYERVKEYCLKVLKKEGENFKALYRSGVAFYHLGDYDKALYYLKEARTQQPTDTNVIRYIQLTEMKLSRCSQREKEAM

SEQ ID NO: 14034 - protein, 49 aa, Homo sapiens
KYLMKSCKNLKGGFQEVAEHLELERIGPQHQAGSDSLLTGMAFFKMREV

SEQ ID NO: 14035 - protein, 243 aa, Homo sapiens
RPIGEFRSNADYQYQLLRCNVDLLKIIQLGLTFMNEQGEYPPGTSTWQFNFKFNLTEDMYAQDSIELLTTSGIQFKKHEEEGIETQYFAELLMTSGVVLCEGVKWLSFHSGYDFGYLIKILTNSNLPEEELDFFEILRLFFPVIYDVKYLMKSCKNLKGGLQEVAEQLELERIGPQHQAGSDSLLTGMAFFKMREMFFEDHIDDAKYCGHLYGLGSGSSYVQNGHRGMHMEEGSQQGSPWTWK

SEQ ID NO: 14036 - protein, 75 aa, Homo sapiens
  misc_feature (1)...(75): Xaa = X or * as defined in Table 2
IWVFHNLKGLFEIFCCILKYFLEELLILFXKTKLXKHASFLKNNPSIQDMESSTTVHRSGLGGSLCADVLSLQWL

SEQ ID NO: 14037 - protein, 109 aa, Homo sapiens
FFFFFLIPFFFIIQHFIHNKYKLFTATVKKAHLHRGSLRALTCALWCWIPYPGWRGYFLKRRHVFTTLFFKIKLGSSSKKYFKNTTKGFQITLLRFVEKPKFKGQFGLG

SEQ ID NO: 14038 - protein, 218 aa, Homo sapiens
  DOMAIN (147)..(161): Ribosomal protein L1 proteins domain identified by eMATRIX, accession number BL01199, p-value=7.923e-12, raw score of 8.49
  DOMAIN (47)..(218): L1P family of ribosomal proteins domain identified by PFam, accession name Ribosomal_L1, E-value=1e-08, PFam score of -1.9
  misc_feature (1)...(218): Xaa = X or * as defined in Table 2
TSEASRQSERVDSAALSALSLLSRSSKCRPWGTARVARAGGCLTPLLSRRFLETRPFTGPWDPGLGVTCWCCPPKRRLKSTPRPKFSVCVLGDQQHCDEAKAVDATFEVCLGDQVLSNANGFLSLSAKKYDAFLASESLIKQIPRILGPGLNKAGKFPSLLREEGQAICYSSTNLTXSSLPSSQVLCLAVAVGHVKMTDDELVYNIHLAVNFLVSLLK

SEQ ID NO: 14039 - protein, 227 aa, Homo sapiens
  DOMAIN (7)..(227): L1P family of ribosomal proteins domain identified by PFam, accession name Ribosomal_L1, E-value=4.6e-11, PFam score of 32.6
EAMSSKVSRDTLYEAVREVLHGTQRKRRKFLETVELQISLKNYDPQKDKRFSGTVRLKSHSPALSFSVCVLGDRQHCDEAKAVDIPHMDIEALEKTSTKNKKLVKKAGQRKYDAVFGPQSLLIKQIPRIPRAPGLNKAGKFPSLLTHNENMVAKVDEVKSPIKFQMKKVLCLAVAVGHVKMTDDELVFNIHLAVNFLVSLLKKNWQKCSGALYYQEAPMGQSPKRLY

SEQ ID NO: 14040 - protein, 91 aa, Homo sapiens
PRVRGRVGAFPTYGTDLEASLLSFEKLDRASPYLWPEQLPGVAEFAASFKSPITSSPPKWMAEIERDDIDMLKATEMTRGKFLNILEKPKK

SEQ ID NO: 14041 - protein, 112 aa, Homo sapiens
MASPTDGTDLEASLLSFEKLDRASPDLWPEQLPGVAEFAASFKSPITSSPPKWMAEIERDDIDMLKELGSLTTANLMEKVRGLQNLAYQLGLDESREMTRGKFLNILEKPKK

SEQ ID NO: 14042 - protein, 270 aa, Homo sapiens; identical to SEQ ID NO: 10080
  DOMAIN (103)..(156): Death effector domain proteins domain identified by eMATRIX, accession number PF01335A, p-value=1.284e-11, raw score of 25.98
  DOMAIN (1)..(176): Death effector domain identified by PFam, accession name DED, E-value=9.2e-70, PFam score of 245.2

SEQ ID NO: 14043 - protein, 71 aa, Homo sapiens
NAKQVGDRGKPCVCHYGLSLAWDPCMLKYCHSRDRPTPYKCGIRSCHKSYSFDFYVPQRQLCVWDEDPYPG

SEQ ID NO: 14044 - protein, 35 aa, Homo sapiens
CAPSPVRGAMASARLFALLLFFVGGVAESMTWKTP

SEQ ID NO: 14045 - protein, 51 aa, Homo sapiens; identical to SEQ ID NO: 13643
  misc_feature (1)...(51): Xaa = X or * as defined in Table 2

SEQ ID NO: 14046 - protein, 86 aa, Homo sapiens
  misc_feature (1)...(86): Xaa = X or * as defined in Table 2
YIIRTQTQISHHPLHYILGSAKKKLCFGKSYFIRGSSFRKGQGHEERGLKYKKKTGEGVXXKRTKKQTKTKTKTIKYKLSRCCGNV

SEQ ID NO: 14047 - protein, 61 aa, Homo sapiens
EFMLKWIYRIFVNLFLVFVRFFNCSFLCAECISLPGQECGGAEVSSFSRTFPQHLLSLYLM

SEQ ID NO: 14048 - protein, 54 aa, Homo sapiens
  misc_feature (1)...(54): Xaa = X or * as defined in Table 2
LFFFFFLESTRFYXFFFFFFFFFTIQTFKGGPLSPFFFLLFFIKPLPQFFFFIL

SEQ ID NO: 14049 - protein, 46 aa, Homo sapiens
ASGHREVQDSYEAYGQDDWNGTITSLKAPPARPVKGAYREHPYGRY

SEQ ID NO: 14050 - protein, 404 aa, Homo sapiens
MQRRDDPAARMSRSSGRSGSMDPSGAHPSVRQTPSRQPPLPHRSRGGGGGSRGGARASPATQPPPLLPPSATGPDATVGGPAPTPLLPPSATASVKMEPENKYLPELMAEKDSLDPSFTHAMQLLTAEIEKIQKGDSKKDDEENYLDLFSHKNMKLKERVLIPVKQYPKEEELRKGGDPKYAHLNMDLHVFIEVFGPPCEAYALMAHAMEEVKKFLVPDMMDDICQEQFLELSYLNGVPEPSRGRGVPVRGRGAAPPPPPVPRGRGVGPPRGALVRGTPVRGAITRGATVTRGVPPPPTVRGAPAPRARTAGIQRIPLPPPPAPETYEEYGYDDTYAEQSYEGYEGYYSQSQGDSEYYDYGHGEVQDSYEAYGQDDWNGTRPSLKAPPARPVKGAYREHPYGRY

SEQ ID NO: 14051 - protein, 48 aa, Homo sapiens
YYDYGHGEVQDSYEAYGQDDWNGTRPSLKAPPARPAKGAYREHPYGRY

SEQ ID NO: 14052 - protein, 537 aa, Homo sapiens
  DOMAIN (194)..(246): KH domain identified by PFam, accession name KH-domain, E- value=0.01, PFam score of 21.5
  misc_feature (1)...(537): Xaa = X or * as defined in Table 2
ASVATAPALPPPPTAARASVAAASLSRSLDRTSSQMQRRDDPAARMSRSSGRSGSMDPSGAHPSVRQTPSRQPPLPHRSRGGGGGSRGGARASPATQPPPLLPPSATGPDATVGGPAPTPLLPPSATASVKMEPENKYLPELMAEKDSLDPSFTHAMQLLTAEIEKIQKGDSKKDDEENYLDLFSHKNMKLKERVLIPVKQYPKFNFVGKILGPQGNTIKRLQEETGAKISVLGKGSMRDKAKEEELRKGGDPKYAHLNMDLHVFIEVFGPPCEAYALMAHAMEEVKKFLVPDMMDDICQEQFLELSYLNGVPEPSRGRGVPVRGRGAAPPPPPVPTGRGVGPPRGALVRGTPVRGAITRGATVTRGVPPPPTVRGAFCXRARTAGIQRIPLPPPPAPETYEEYGYEDTYAEQSYEGYEGYYSQSQGDSEYYDYGHGEVQDSYEALWPRTNWNGTRPSLKAPLARPVKGAYREPPYGRLLKTKHEGENISYEQSLLLDFLYLPGIPVALPTTDQGNWSKCFFFRGSPSFSPTLIPFL

SEQ ID NO: 14053 - protein, 97 aa, Homo sapiens
  misc_feature (1)...(97): Xaa = X or * as defined in Table 2
LSFVGSLSRLFTAGFAECPRFRFRPAPNPRTPSTRNSAPDSQKGATWATAVQAAPRWTXETGSNPWPTLAAPCSRSPRGPPASFSGGPSASCKLCLK

SEQ ID NO: 14054 - protein, 24 aa, Homo sapiens
RGFFFFFFFFFFFFFFFQQKSQIY

SEQ ID NO: 14055 - protein, 95 aa, Homo sapiens
  misc_feature (1)...(95): Xaa = X or * as defined in Table 2
CFLXDRVLLCHPGWSAVAHNHSSLQPXTPGIKQFSCLRLSSSXDYRCTSPYLAIFFFFXFFCRKQSLATVPRTISNSWPQAILLSWSKHVEITGF

SEQ ID NO: 14056 - protein, 20 aa, Homo sapiens
AASTFNFYFYFEIIVDLHAV

SEQ ID NO: 14057 - protein, 22 aa, Homo sapiens
FFFLCFFNFYFYFEIIVRFTCS

SEQ ID NO: 14058 - protein, 627 aa, Homo sapiens
  DOMAIN (6)..(42): RIBOSOMAL PROTEIN CHLOROPLAST 50S L32 domain identified by eMATRIX, accession number PD02218, p-value=7.353e-09, raw score of 17.40
KINLLLNPKKKKKKKKKKKKKKKKKKKKKKKKKKKKKKKKEEVDLKPMKEKNAKEELIRWEEGKKWQAKIEGIRNKLKEKEGEVFTLTKQLNTLKDLFAKADKEKLTLQRKLKTTGMTVDQVLGIRALESEKELEELKKRNLDLENDILYMRAHQALPRDSVVEDLHLQNRYLQEKLHALEKQFSKDTYSKPSISGIESDDHCQREQELQKENLKLSSENIELKFQLEQANKDLPRLKNQVRDLKEMCEFLKKEKAEVQRKLGHVRGSGRSGKTIPELEKTIGLMKKVVEKVQRENEQLKKASGILTSEKMANIEQENEKLKAELEKLKAHLGHQLSMHYESKTKGTEKIIAENERLRKELKKETDAAEKLRIAKNNLEILNEKMTVQLEETGKRLQFAESRGPQLEGADSKSWKSIVVTRMYETKLKELETDIAKKNQSITDLKQLVKEATEREQKVNKYNEDLEQQIKILKHVPEGAETEQGLKRELQVLRLANHQLDKEKAELIHQIEANKDQSGAESTIPDADQLKEKIKDLETQLKMSDLEKQHLKEEIKKLKKELENFDPSFFEEIEDLKYNYKEEVKKNILLEEKVKKLSEQLGVELTSPVAASEEFEDEEESPVNFPIY

SEQ ID NO: 14059 - protein, 320 aa, Homo sapiens
  DOMAIN (146)..(191): kw TRANSCRIPTASE REVERSE II ORF2 domain identified by eMATRIX, accession number DM01354N, p-value=4.420e-40, raw score of 13.17
MGKDFMTKTPTPMATKAKIDKWDLNKLKSFCTAKDTIVRVNRQPIEWEKIFAIYPSDKRLIATIYKELKQTYKKKINNLIKKQTGCGADLQQTPADLQQTGLSVRKKTDKQKGIASTSTKRTSTQKPHPKITNMKTKEIQTTIKEYYEHLYTNKLENLQEMDKFLDTYTFPGLNQEEVQSLNRPITSSEIEAVINSLPTKKSPGPDRFTAEFYQRDMDEAGNHHSQQTNTGTENQTLHILTHKWELNNENTWTQGGEYHTPGPVRVWGNRGGIALGEIPNECSSSPATDQSWMENDFDELKEEGFRRLVITNFSELKEDV

SEQ ID NO: 14060 - protein, 82 aa, Homo sapiens
  misc_feature (1)...(82): Xaa = X or * as defined in Table 2
NKRGYKQMEEHSMLMGRKNQYRKNGHTAQGNLXIQCHPHQATNDFLHRIGKNDFQVHMEPKKSPHRQVNPKPKEQSWRHHAT

SEQ ID NO: 14061 - protein, 201 aa, Homo sapiens
  misc_feature (1)...(201): Xaa = X or * as defined in Table 2
PDQVDRGGAHWQTDADDPWLADHLQHCQRCGEILRHYSGGIRGNVSAVKCAEHHVPAFARLRNPQCGDFQRLDYRLFDSPGVKRRELXTAYRFCHVAPXLMDLRSGWAAGAVYRYQSHXFTADRLRSVDMDEAGNHHSQQTSQDQKIKQRTFSLISGSXTTRTHGHREGNITHRGLSRPNTARILCASKAHLGLPLRSSLP

SEQ ID NO: 14062 - protein, 71 aa, Homo sapiens
NKRGHIQMEKHSMLMDRKNQYHEYGHTAQSNLWIQCYPHQATIDFLHRIRKNYFKVHTEPKKSPYSQDNPK

SEQ ID NO: 14063 - protein, 225 aa, Homo sapiens
  DOMAIN (107)..(160): Death effector domain proteins domain identified by eMATRIX, accession number PF01335A, p-value=1.284e-11, raw score of 25.98
  DOMAIN (5)..(182): Death effector domain identified by PFam, accession name DED, E-value=3e-66, PFam score of 233.5
SKSRMSAEVIHQVEEALDTDEKEMLLFLCRDVAIDVVPPNVRDLLDILTERGKLSVGDLAELLYRVRRFDLLKRILKMDRKAVETHLLRNPHLVSDYRVLMAEIGEDLDKSDVSSLIFLMKDYMGRGKISKEKSFLDLVVELEKLNLVAPDQLDLLEKCLKNIHRIDLKTKIQKYKQSVQGAGTSYRNVLQAAIQKSLKDPSNNFRMITPYAHCPDLKILGNCSM

SEQ ID NO: 14064 - protein, 660 aa, Homo sapiens
MGDGTSDFDPIGDIGIRQSNYSCGGCPRIPYVWRVTGRAHGTQTIVVFMAKVYYGNVMRREKDSGGAWGNPWAGILLPPPSTRNCTVHSSFSNENIFPQHTSSCVVVHNQYIGADFPWSNFSFVVEYNYVEDSCWTKHCKELNIPYMAFKVILPDTVLERSTLLDRFGGFLLEIQIPYVFFASEGLLNTPDILQLLESKDMDEAGNHHSEQTVTRTENQTLHVLTHRWELNNENTWTQDGEHHTPGPVVGWRELIIAPGVEATALIIRQIADHSLMTSKRDPHEWLDKSWLKVSPSEENRNQISTLSSQSSASDLDSVIQEHNEYYQYLGLGETVQEDKTTILNDNSSIMELKEISSFLPPVTSYNQTSYWKDSSCKSNIGQNTPFLINIESRRPAYNSFLNHSDSESDVFSLGLTQMNCETIKSPTDTQKRVSVVPRFINSQKRRTHEAKGFINKDVSDPIFSLEGTQSPLHWNFKKNIWEQENHPFNLQYGAQQTACNKLYSQKGNLFTDQQKCLSDESEGLTCESSKDETFWRELPSVPSLDLFRASDSNANQKEFNSLYFYQRAGKSLGQKRHHESSFNSGDKESLTEEKTEAQEKMTTEDRGRGWGYATTNRRMPRIAGNHQEPGERRGTPPPSEAPEGSNPANTLILDFPPPEL

SEQ ID NO: 14065 - protein, 99 aa, Homo sapiens
  misc_feature (1)...(99): Xaa = X or * as defined in Table 2
FLLHFFLHDXIYSSNKLQKVNKSIPPTGPSLCPCVLIVQLPLMSENMRCLVFCSCVSLLRMMVSSFIHVPLNFFNAFLLLNFFRFCPLLSCHMIKKSSS

SEQ ID NO: 14066 - protein, 199 aa, Homo sapiens
MDENLPSELKANPTQTSYMPSIKSYRGAGQLKIAQESGVSVQGHWSMKREGFQKLERTHKNFQMKFSRWGIAVGKLNEQHDCHKEEAVTGTSCMKELKDKSYRRIQQHRDMDEAGNHHSQQTIRRTENRTLHALTHKWELNNENTWTQEDPSTPVNSTATNRIQVTSSGLWQKASSVSPLLPVPTLPWSRFHIIAQGIF

SEQ ID NO: 14067 - protein, 239 aa, Homo sapiens
  misc_feature (1)...(239): Xaa = X or * as defined in Table 2
MTSYNEQNKKPVTDPNEMAIHEDSNQEFKIAVVNETQRSPRSSPTEHLMTPPPLPTREQQPPLTVIFHYLPKSYKTAPPLSPFPDSLFGLSQPAPRDMDEAGNHHSQQTKQEQKTKHCMFSLTSGSXTMRTHGHREGTVIHRGLLGQFSQQLINKSEFSNTVCREKSGRVLQVNMESPLXMIQDALQDQTTPKGPITVFLXLFYLDHLLRSSHKVASYLSTESRSRGSITVLFIRCSEP

SEQ ID NO: 14068 - protein, 93 aa, Homo sapiens
  misc_feature (1)...(93): Xaa = X or * as defined in Table 2
DRNRKANTACFQHSQVGVEQXEHMDTGKVXSIXYGNYEHTSTCERMEIQKATTEHLNLXSXSGSFLRFTWKMLQFSKISRSFYQVLKHQQKIM

SEQ ID NO: 14069 - protein, 387 aa, Homo sapiens
  DOMAIN (87)..(161): Fibronectin type III domain identified by PFam, accession name fn3, E-value=0.0011, PFam score of 25.7
  misc_feature (1)...(387): Xaa = X or * as defined in Table 2
RSPTLLMHVHYIKVISWRELLLIWLRAANASINPGVEQSPSGDPKTVTGFPFLRLEAADWVEEASVPKGVHIALSSQEQRAGDPRDLEAPSNLVISERTHRSFRVSWTPPSDSVDRYKVEYYPVSGGKRQEVVRTPGVPDLRLPAIIPQAAWLLAHLPAPSAPPTELPTKHTEAQSQRCWSLLLCSVTEVAAPSQVVKEAPPSFHTGTENGYQGEESLFNKAYYGGGTNFFRKESQKLQQSAKKRDAELANGALGIIELNNDYTLKKVMKPLITSNTVTDEIERANVFKMNGKWYLFTDSRGSKMTIDENKIPRNPTYKGREGPLQGELQTTAQGNKRGYKQMEEHSMLMDRKNQYRENGLTAQAPQPPPSGIXGYTAPCFPWENLI

SEQ ID NO: 14070 - protein, 148 aa, Homo sapiens
QACYIYTTEYYAAIKNDEFTVLCRDMDEAGNHHSQQTVTRTKNQTPHVLTHRWELNNENTWTQEGEHHTPGPVMLDSAPPTLGHQTPGSSAFGLWDLHQRLRLPRPQTKGSTVGFPGSEAFKLGLGHYWLSFFPSLQTAYRGTLPFNH

SEQ ID NO: 14071 - protein, 290 aa, Homo sapiens
MDEAGNHHSQQTITRTENQTMHVLTHKWELNNENVWTQVYKESSPHKAAAAQGAGKKKGFVNYYGPQRFGKGRKVHTDQIGLALLKNEMDAKGTLSLMPEFKVRERALLEALHRFGMTEEGCIQAWFSLPHSMRIFYVHAYTSKIWNEAVSYRLETYGARVVQGDLVCLDEDIDDENFPNSKVVLPVLGYNIQYPKNKVGQWYHDILSRDGLQTCRFKVPTLKLNIPGCYRQILKHPCNLSYQLMEDHDIDVKTKGSHIDETALSLLISFDLDASCYATVCLKEIMKHDV

SEQ ID NO: 14072 - protein, 651 aa, Homo sapiens
MKLEAIILSKLTQEQKNQTLHVLTHRWELNNENTWTQGGEYHTLGPVDGFQKKEEAAIGAILQPLLVIQTVLGVDLQQTLADLQQRGLLEEKLTNRKKIAHTVRDHIQREHNSSPAREQNWMENTFDELTQVGFRRWVINSSELKEHDLTQCKKGTWMMLETIIFSKLTQEQKNQTLHVLTHKWELNNENTWTQGGEHHTLGPVWRMFQIYVVAERMLDKIPSLAFGLLDLRQWFARGCWSFGHRLKAARITAPRLAREQNWMENEFDKLTEVVFRRWVITKSKLKEHALTQCKEDKNLEKKELATQQKMSSRTASEASSVFTATPHCYHYYLSSASYHISGSIRFPVLEKIRLHMGLENKCKVLLSGGSSSQQMYGDLEGGWNGKVVFPWSWAVQEPASPPTTLGQISLTVCCSTVNGLPASVDVFFCREALPRNLQKFPAKDLGCILLQYIDNLLLGYSTAVGCARRMDALLRHLEDCGYKVSKKKAQICRQQTEGEQTIRERWIKLSDGRIAVPQLLGAAVVLAVHKTIHLGQESLEKLLGQYFYISHLPALAKTVAQQCVTCQQRHAKQGPSVPPGIQAYRVASFENLQVDFTEMPKCGDQGLERGSTVALVEGTPDHYPDHSHSYKGRRNPKLDSHSCVKPATAKT

SEQ ID NO: 14073 - protein, 156 aa, Homo sapiens; identical to SEQ ID NO: 13842
  DOMAIN (50)..(105): Actins proteins domain identified by eMATRIX, accession number BL00406D, p-value=1.000e-40, raw score of 12.58
  DOMAIN (40)..(156): Actin domain identified by PFam, accession name actin, E- value=3.5e-74, PFam score of 244.7

SEQ ID NO: 14074 - protein, 84 aa, Homo sapiens
  DOMAIN (4)..(32): !!!! PROTEIN ALU SUBFAMILY WARNING ENTRY NUCLEAR PHOSPHO domain identified by eMATRIX, accession number PD02454B, p-value= 8.088e-13, raw score of 11.61
  misc_feature (1)...(84): Xaa = X or * as defined in Table 2
GGQIMRSGYXDHPGXHGETRSLLKIQKLAGHGGRHLXSQLLRRPRLENRLNLGGRGCSEPSSRHCTAAWATEXDSVSKKKKSRR

SEQ ID NO: 14075 - protein, 385 aa, Homo sapiens
  DOMAIN (108)..(161): Death effector domain proteins domain identified by eMATRIX, accession number PF01335A, p-value=1.284e-11, raw score of 25.98
  DOMAIN (5)..(181): Death effector domain identified by PFam, accession name DED, E-value=4.5e-65, PFam score of 229.6
SKSRMSAEVIHQVEEALDTDEKEMLLFLCRDVAIDVVPPNVRDLLDIFTRERGVLSVGDLAELLYRVRRFDLLKRILKMDRKAVETHLLRNPHLVSDYRVLMAEIGEDLDKSDVSSLIFLMKDYMGRGKISKEKSFLDLVVELEKLNLVAPDQLDLLEKCLKNIHRIDLKTKIQKYKQSVQGAGTSYRNVLQAAIQKSLKDPSNNFRLHNGRSKEQRLKEQLGAQQEPVKKSIQESEAFLPQSIPEERYKMKSKPLGICLIIDCIGNETELLRDTFTSLGYEVQKFLHLSMHGISQILGQFACMPEHRDYDSFVCVLVSRGGSQSVYGVDQTHSGLPLHHIRRMFMGDSCPYLAGKPKMFFIQNYVVSEGPAGEQQPLGGWMGQR

SEQ ID NO: 14076 - protein, 79 aa, Homo sapiens; identical to SEQ ID NO: 12937
  DOMAIN (30)..(79): Actins proteins domain identified by eMATRIX, accession number BL00406E, p-value=7.000e-33, raw score of 8.44
  DOMAIN (4)..(79): Actin domain identified by PFam, accession name actin, E- value=3e-35, PFam score of 117.0

SEQ ID NO: 14077 - protein, 146 aa, Homo sapiens
  DOMAIN (1)..(146): Actin domain identified by PFam, accession name actin, E- value=7.6e-78, PFam score of 256.7
  misc_feature (1)...(146): Xaa = X or * as defined in Table 2
TGIVMDSSDGITHTMPIYEGYTLPHAILPLDLAGQDLTDYFMKILKEGGYSFTTTAEREIMLDIKEKLCYITLDFEQEMATAASSSSLEKSXELLNGQVITISNQWFHCPEYLFQPSFFTSIMKCDVDICKDLYANTVLSGGTTMY

SEQ ID NO: 14078 - protein, 70 aa, Homo sapiens
  DOMAIN (21)..(70): Actins proteins domain identified by eMATRIX, accession number BL00406E, p-value=1.000e-40, raw score of 8.44
  DOMAIN (9)..(70): Actin domain identified by PFam, accession name actin, E- value=2.6e-43, PFam score of 143.4
PGSTHASTRREITALAPSTMKIKIIAPPERKYSVWIGGSILASLSTFQQMWISKQEYDESGPSIVHRKCF

SEQ ID NO: 14079 - protein, 147 aa, Homo sapiens
  DOMAIN (50)..(105): Actins proteins domain identified by eMATRIX, accession number BL00406D, p-value=1.000e-40, raw score of 12.58
  DOMAIN (2)..(147): Actin domain identified by PFam, accession name actin, E- value=7e-96, PFam score of 315.9
IVEFEQEMATAASSSSLEKSYELPDGQVITIGNERFRCPEALFQPSFLGMESCGIHETTFNSIMKCDVDIRKDLYANTVLSGGTTMYPGIADRMQKEITALAPSTMKIKIIAPPERKYSVWIGGSILASLSTFQQMWISKQEYDESG

SEQ ID NO: 14080 - protein, 484 aa, Homo sapiens
  DOMAIN (116)..(151): Actins proteins domain identified by eMATRIX, accession number BL00406A, p-value=1.000e-40, raw score of 9.95
  DOMAIN (109)..(484): Actin domain identified by PFam, accession name actin, E- value=4.6e-255, PFam score of 838.3
  misc_feature (1)...(484): Xaa = X or * as defined in Table 2
MSTRPRRPPQLGRSTGRARLASRVAAAAGPPGARAPLAGDRAPAAGAPRRAGAGPCRPDPFPPAAGPTRGSPREGGKTGNRGKEREKGRRAQSLAFADPPPVATRRQLTMDDDIAALVVDNGSGMCKAGFAGDDAPRAVFPSIVGRPRHQGVMVGMGQKDSYVGDEAQSKRGILTLKYPIEHGIVTNWDDMEKIWHHTFYNELRVAPEEHPVLLTEAPLNPKANREKMTQIMFETFNTPAMYVAIQAMLSLYASGRTTGIVMDSGDGVTHTVPIYEGYALPHAILRLDLAGRDLTDYLMKILTERGYSFTTTAEREIVRDIKEKLCYVALDFEQEMATAASSSSLEKSYELPDGQVITIGNERFRCPEALFQPSFLGMESCGIHETTFNSIMKCDVDIRKDLYANTVLSGGTTMYPGIADRMQKEITALAPSTMKIKIIAPSXRKYSVWIGGSILGLLSTFQQMWISKQEYDESGPSIVHRKCF

SEQ ID NO: 14081 - protein, 74 aa, Homo sapiens
  misc_feature (1)...(74): Xaa = X or * as defined in Table 2
GKPKPKPKPLPKPKSREISHIPXGLXKAGPFRAPGRPGCKPCWLGPSGPGGRXGCPXKASPEKVLGENLTLKNP

SEQ ID NO: 14082 - protein, 87 aa, Homo sapiens
  misc_feature (1)...(87): Xaa = X or * as defined in Table 2
SRRGSSPAQGSLGRPQLLSAQYKWVGVGGDRVSLXTMDPSLAPKTNQRASQSKLDLQPAXAPWPPQLCGHPVPSPASCPKSPTFKPT

SEQ ID NO: 14083 - protein, 210 aa, Homo sapiens
  DOMAIN (32)..(80): 352 FIBRILLAR COLLAGEN CARBOXYL-TERMINAL domain identified by eMATRIX, accession number DM01418A, p-value=6.100e-23, raw score of 20.83
  DOMAIN (25)..(209): Fibrillar collagen C-terminal domain identified by PFam, accession name COLFI, E-value=2.6e-54, PFam score of 140.2
DHYARALELQIFKTLHYLSNLIQSIMTPLGTKENPARVCRDLMDCEQTMVDGTYWVDPNLGCSSDTIEVSCNFTHGGQTCLKPITASKVEFAISRVQMNFLHLLSSEVTQHITIHCLNMTVWQEGTGQTPAKQAVRFRAWNGQIFEAGGQFRPEVSMDGCKVQDGRWHQTLFTFRTQDPQQLPIISVDNLPPASSRESSTAWEVGPACFL

SEQ ID NO: 14084 - protein, 197 aa, Homo sapiens
MTSVHSADDGNIWQHPLQCGGDDRDLVEFNLGSPKNVGPFLAVDQKHNILLKYRCHGPPIRFTTVFSNELHYVANELNGIVGGKTQCTFPLEVYIRRLRNIRRAVVRLLDRSPQTVVVIRTANAQELGPEVSLFNSDWYNFQLDTILRRMFSGVGVYLVDAWEMTLAHYLPHKLHPDEVIVKNQLDMFLSFVCPLET

SEQ ID NO: 14085 - protein, 244 aa, Homo sapiens
RNHISSNFRETSHDFNPEILLLLGQDKVALQKLNDAATKLQACGDLVEFNLGSPKNVGPFLAVDQKHNILLKYRCHGPPIRFTTVFSNELHYVANELNGIVGGKNTVVAIAVWSHFSTFPLEVYIRRLRNIRRAVVRLLDRSPKTVVVIRTANAQELGPEVSLFNSDWYNFQLDTILRRMFSGVGVYLVDAWEMTLAHYLPHKLHPDEVIVKNQLDMFLSFVCPLETYPVLEGTGGIIFNDLLN

SEQ ID NO: 14086 - protein, 27 aa, Homo sapiens
KDKRVGKMYKEVPLSKGSKKYNDINII

SEQ ID NO: 14087 - protein, 317 aa, Homo sapiens
  DOMAIN (164)..(312): Cadherin cytoplasmic region domain identified by PFam, accession name Cadherin_C_term, E-value=3.4e-75, PFam score of 263.2
GTRQVLNINDHAPEFSQYYETYVCENAGSGQVIQTISAVDRDESIEEHHFYFNLSVEDTNNSSFTIIDNQDNTAVILTNRTGFNLQEEPVFYISILIADNGIPSLTSTNTLTIHVCDCGDSGSTQTCQYQELVLSMGFKTEVIIAILICIMIIFGFIFLTLGLKQRRKQILFPEKSEDFRENIFQYDDEGGGEEDTEAFDIAELRSSTIMRERKTRKTTSAEIRSLYRQSLQVGPDSAIFRKFILEKLEEANTDPCAPPFDSLQTYAFEGTGSLAGSLSSLESAVSDQDESYDYLNELGPRFKRLACMFGSAVQSNN

SEQ ID NO: 14088 - protein, 49 aa, Homo sapiens
FAPSDLFHYLLLQHLHLILWPLQMPRQGETSGNEPQESGHLRVPGDDAS

SEQ ID NO: 14089 - protein, 42 aa, Homo sapiens
  DOMAIN (1)..(38): Tub family proteins domain identified by eMATRIX, accession number BL01200D, p-value=4.060e-34, raw score of 10.84
VWNDDTQSYVLNFHGRVTQASVKNFQIIHGNDQTQRCDTILI

SEQ ID NO: 14090 - protein, 99 aa, Homo sapiens
GAHPASSESRGVPGARWHRGRSGRPGSQEGEAAAPSGPDWSSKSGGYPRSSGPGRWLQPREGIAGSNSGKGKQRHGTSAHWMRIHLPFELGIDFVKDIM

SEQ ID NO: 14091 - protein, 718 aa, Homo sapiens
  DOMAIN (186)..(215): TROPOMYOSIN SIGNATURE domain identified by eMATRIX, accession number PR00194C, p-value=5.500e-32, raw score of 6.38
  DOMAIN (89)..(299): Tropomyosins domain identified by PFam, accession name Tropomyosin, E-value=9.9e-156, PFam score of 487.4
STGGQEEQEEQEQEEQEEQEEQEEQEEQEQEEEEEEKEEQEEQEEEEQEQEEQEGEEAATPSGGGRNRSASSSWVGTMAGITTIEAVKRKIQVLQQQADDAEERAERLQREVEGERRAREQAEAEVASLNRRIQLVEEELDRAQERLATALQKLEEAEKAADESERGMKVIENRALKDEEKMELQEIQLEEAKHIAEEADRKYEEVARKLVIIEGDLERTEERAELAESRCREMDEQIRLMDQNLKCLSAAEEKYSQKEDKYEEEIKILTDKLKEAETRAEFAERSVAKLEKTIDDLEDTNSTSGDPVEKKDETPFGVSVAVGLAVFACLFLSTLLLVLNKCGRRNKFGINRPAVLAPEDGLAMSLHFMTLGGSSLSPTEGKGSGLQGHIIENPQYFSDACVHHIKRRDIVLKWELGEGAFGKVFLAECHNLLPEQDKMLVAVKALKEASESARQDFQREAELLTMLQHQHIVRFFGVCTEGRPLLMVFEYMRHGDLNRFLRSHGPDAKLLAGGEDVAPGPLGLGQLLAVASQVAAGMVYLAGLHFVHRDLATRNCLVGQGLVVKIGDFGMSRDIYSTDYYRVGGRTMLPIRWMPPESILYRKFTTESDVWSFGVVLWEIFTYGKQPWYQLSNTEAIDCITQGRELERPRACPPEVYAIMRGCWQREPSNATASRMCTPGCKPWPRHLLSTWMSWARGPAQGLGVVSRNTGACPQHPP

SEQ ID NO: 14092 - protein, 61 aa, Homo sapiens
  DOMAIN (2)..(28): TROPOMYOSIN SIGNATURE domain identified by eMATRIX, accession number PR00194E, p-value=2.500e-26, raw score of 8.74
  DOMAIN (1)..(55): Tropomyosins domain identified by PFam, accession name Tropomyosin, E-value=1.4e-32, PFam score of 104.0
HELKEAETRAEFAERSVAKLEKTIDDLEDELYAQKLKYKAISEELDHALNDMTSIASLQPT

SEQ ID NO: 14093 - protein, 285 aa, Homo sapiens
  DOMAIN (201)..(255): Kinesin light chain repeat proteins domain identified by eMATRIX, accession number BL01160B, p-value=4.081e-10, raw score of 19.54
  DOMAIN (7)..(285): Tropomyosins domain identified by PFam, accession name Tropomyosin, E-value=1.2e-155, PFam score of 487.1
MMEAIKKKMQMLKLDKENALDRAEQAEAEQKQAEERSKQLEDELAAMQKKLKGTEDELDKYSEALKDAQEKLELAEKKAADAEAEVASLNRRIQLVEEELDRAQERLATALQKLEEAEKAADESERGMKVIENRALKDEEKMELQEIQLKEAKHIAEEADRKYEEVARKLVIIEGDLERTEERAELAESKCSELEEELKNVTNNLKSLEAQAEKYSQKEDKYEEEIKILTDKLKEAETRAEFAERSVAKLEKTIDDLEDELFAQKLKYKALSEELDHALNDMTSI

SEQ ID NO: 14094 - protein, 213 aa, Homo sapiens
  DOMAIN (12)..(27): Isocitrate and isopropylmalate dehydrogenases proteins domain identified by eMATRIX, accession number BL00470C, p-value=1.000e- 08, raw score of 15.43
MLSIQSTHAEKELENFFQNTEDWYFHTSHHLATWIKQKSEKDPVHLQKGKNGPSCTKGQCNPLELVITNPLDPCWKKEERVTLGIDGAGLDPQVHILVRGEVYKHSPEPVFQTFCDELNVPVPEIPGKTRNLFLQLAWHVAQCLNVTSCYVCGRTIIGDQWPQEAQELVPTDPVPDEFLAQKNHPDNFWVLKPSIIGQYCIAREGKEFTHPIG

SEQ ID NO: 14095 - protein, 570 aa, Homo sapiens
  DOMAIN (140)..(269): RNase H domain identified by PFam, accession name rnaseH, E- value=2.5e-16, PFam score of 67.7
MAVGVLTQTVRLWPRPVAYLSKQLDGVSKGWPPCLRALAAMALLAQEADKLTLGQNLNIKAFHTVVTLMNTKGHHWLTNARLTKYQSLLCENPRIITDVCNTLNPATLLPVSESLVKHNCVDMLDSVYSSRPDLRDQPWASADWELYMDGSNFINPHGERCAGYAVVTLNAVIEAKPLPQGTSAQKAELIALTRALELSEVHGALYKEKGLLNSRGKDIKYQQEILQLLEAVWKPQKVAVMHCRGHQRASTSVALGNSQTDSEARKAASTPYCASVAAPLLPQTPDLVPTYSKEEKDFFHTEVGQVIKEGWIRLPDGKVAVPQLLRATVVLAMHETTLLGQESLEKLLGRYFYISHLPALAKAVAQCIQAYGAAPFEGLQVDFTEMPKCEGNKYLLVLVCTYSGWVEAYPTQTEKAYEVTRVLLRDLIPRFGLPLRIGSHNGPVFVADLDCVEINVDTGVIWATWIKNEKDPVQLQKGKSGPSCTKGQCNPLELVITNPLDPRWKKGERVTLGINGAGLDPRVNILVRGEVYKHSPEPVLQTFYDELNVPVPEIPGKTRNLFLQLAKHVA

SEQ ID NO: 14096 - protein, 147 aa, Homo sapiens
FWLWVSFWVPCNTHTTSKSTSFSSPSTQATRFGVLWFVIKASIIGQYCIARERKEFTHPVGRLSCLRQKLYNGTTETVTSWSSNHTERNPFSKFPKLRTVWTHPESHRDWTAPTGLYWICGHRAFAKLPDESAGIGGPKQGAIGIKE

SEQ ID NO: 14097 - protein, 771 aa, Homo sapiens
  DOMAIN (370)..(385): WILM'S TUMOUR PROTEIN SIGNATURE domain identified by eMATRIX, accession number PR00049D, p-value=6.644e-09, raw score of 0.00
  DOMAIN (468)..(500): AN1-like Zinc finger domain identified by PFam, accession name zf-AN1, E-value=0.047, PFam score of 8.7
MVYRQNQLPSSCAPEMGREDGLRALHPAQPPPPRAQQSPPPPLSAQKSLHLPVHSKALHRPCSPPTVAILNPSQPHRPPVHSPGSGLGFTQLSPSLEASLGHGLQHARPARHPLPLHMGWATFTLTLVSAPWKLRRRPRLQVAGVPHVQRMEPWAPHAPAELLETQAQLWGHRRGHWIPDGRACNTEFTHPGLEIGARESGSACKGPPPGSLVPFPASPLGSKINGGSCYQILTGSSGKICRINGCSCQNKWSMPTSATASLQTCPARAVPDLGIARRSWSPHRRPSWTHEKSSCPSQKAPQGRAVPLQPGKGGEPVSFWSPGQAPSKARGRRAGSAAMRGRAAKLLSRSRSTGGLCVLCGQGTVGLQMQGRAAPPAPPPAHPLFPRPVSPLDFSASKRALQHPALLGGKDSWRPECGHLNLSHLPSGVKDSWGSECGHLNLSHLPSGVKDSWGSECGHLNLSHLPSGGKDSWGPECYVFCMLHRLPEQHDCTFDHMGRGREEAIMKMVKLDRKVGRSCQRIGEGGQEDDVVASILVSMQPHSPRTPSPHLPYSKFKDFSSCNCARQGWKEMGACVQRPSAVLGGTRPVSVQAKQPLPCFLLGASALGSCGTGLGVKDRDIDRIVVMSVMKILRGNQRPSGDEQARGQRAREGLGGLGVRRACREQWAVLCPLVHRNWVCVSSFLIASQSNSPQQQHNCCYANNSPQQEEGMVGRQAETFLLGGVRNRKPWVGVGRGLQGSHQQHIQGAVSSPSSPKKGVSKREGPRWAQQ

SEQ ID NO: 14098 - protein, 66 aa, Homo sapiens
  misc_feature (1)...(66): Xaa = X or * as defined in Table 2
ARQAQAWFWAWRWAACLWFYFLVVFSXNRYXVSNNKNNIRRSLSSLNSSCKFWSTRQQKXIPKMLS

SEQ ID NO: 14099 - protein, 584 aa, Homo sapiens
  DOMAIN (12)..(27): Isocitrate and isopropylmalate dehydrogenases proteins domain identified by eMATRIX, accession number BL00470C, p-value=1.000e- 08, raw score of 15.43
MLSIQSTHAEKELENFFQNTEDWYFHTSHHLSSLRFFSARESNCSMKLYEEAYMERYRDFLPATMWSAHTEVDVPGQATWIKQKSEKDPVHLQKGKNGPSCTKGQCNPLELVITNPLDPCWKKEERVTLGIDGAGLDPQVHILVRGEVYKHSPEPVFQTFCDELNVPVPEIPGKTRNLFLQLAWHVAQCLNVTSCYVCGRTIIGDQWPQEAQELVPTDPVPDEFLAQKNHPDNFWVLKPSIIGQYCIAREGKEFTHPVGRLSCLGQKLYNGTTETVTWWSSNHIERNPFSKFPKLQTVWTHPESHQDWTAPTGLYWICGHRAYAKLPDHWAGSCVIGTIKPSFFQLPIKTGELLGFPVYASRKKRSIAIENWKDDEWPPPERIIQYYGPVTWAQDGLWGYQTPIYVLNRIIRLQAALEIITDKISRALTILAWQETQMRNAISQNRLALDYLLAAEGGVYGKFNLTNCCLHVDDQGQVVEDIVRDRTKLAHVPVQVWHEFDPGAMFGKWFPALGGFKTLIIGVLIVIGTCLLLPCLLPVLLQMIKSFIATLVHQNASAQVYYVNHYQSIAQKDISSKNKSENSH

SEQ ID NO: 14100 - protein, 31 aa, Homo sapiens
GTPNSANTQGNSTPNPQVIFFPCRAYLKIRL

SEQ ID NO: 14101 - protein, 92 aa, Homo sapiens
FFSLSSVSLPLAKIIPIVNGQIHSVCSETPSHFVQVRRKLGSVIKSKLYLWWWSCLSNIKLHSLLRGFFKKSQNLELHVEYGRVSHESNNGP

SEQ ID NO: 14102 - protein, 288 aa, Homo sapiens
MLRSVWNFLKRHKKKCIFLGTVLGGVYILGKYGQKKIREIQEREAAEYIAQARRQYHFESNQRTCNMTVLSMLPTLREALMQQLNSESLTALLKNRPSNKLEIWEDLKIISFTRSTVAVYSTCMLVVLLRVQLNIIGGYIYLDNAAVGKNGTTILAPPDVQQQYLSSIQHLLGDGLTELITVIKQAVQKVLGSVSLKHSLSLLDLEQKLKEIRNLVEQHKSSSWINKDGSKPLLCHYMMPDEETPLAVQACGLSPRDITTIKLFHKTEDMLGSPDFRQFLNTCFKPRF

SEQ ID NO: 14103 - protein, 94 aa, Homo sapiens
LSANPVWSTLYIHRDKTNTSTCSFFSCLSLSRPCLAYCSFSHLFFCVHTCSAAHPHWQWRYHDHEGGFPRARLIHRTPDMLTPAIFPNVGNSTA

SEQ ID NO: 14104 - protein, 77 aa, Homo sapiens
  misc_feature (1)...(77): Xaa = X or * as defined in Table 2
VAERQTGTGQGTVGDITDRATSMXMRQRRGCCFATCCFRHEGVPVPWQGRYHDHEGGFPRARLIHCTPDVLTPYHVP

SEQ ID NO: 14105 - protein, 158 aa, Homo sapiens
  DOMAIN (9)..(47): Peptidase family U32 proteins domain identified by eMATRIX, accession number BL01276D, p-value=1.794e-09, raw score of 18.39
  misc_feature (1)...(158): Xaa = X or * as defined in Table 2
TDEPSLLSHTFCPKGALLSACSGACPLSSGTQAGMPPSTEALQPCRGLTVPHQQDKGHRACCVWKALAADWSVEWQKGRRGLGKALSVTSRIRATSMXMRQRRGCCFATCCFRHEGVPVPWERGYHDHEGGFPRARLIHCTPDVLTPAISPNVGNSTA

SEQ ID NO: 14106 - protein, 829 aa, Homo sapiens
  DOMAIN (261)..(278): Zinc finger C2H2 type, domain proteins. domain identified by eMATRIX, accession number BL00028, p-value=4.706e-14, raw score of 16.07
  DOMAIN (259)..(310): Zinc finger, C2H2 type domain identified by PFam, accession name zf-C2H2, E-value=4.9e-07, PFam score of 36.8
MTVPELAGETEHCQCLINNVLMYGQPYRVTLELELPESPVNQDLGMFLVTISCYTRGGRIISTSSRSCNVYNSGQRRKLLLFKTFSRKVVVVVPNEEDWKKRLELRKEVEGDDVPESIMLEMKAPVPSQAPAPAEAELVQVKVEAIVISDEETDVSDEQPQGPERAFPSGGAVYGAQPSQPEAFEDPGAAGLEEVGPSDHFLPTDPHLPYHLLPGAGQYHRGLVTSPLPAPASLHEPLYLSSEYEAAPGSFGVFTEDVPTCKTCGKTFSCSYTLRRHATVHTRERPYECRYCLRSYTQSGDLYRHIRKAHNEDLAKRSKPDPEVGPLLGVGLFTEIGPMSCFISRHDIVIQQDDEIRLKIVGTRVDKNDILHLLLHFPVPQEPWATVMEKRLQEAQLYKEEGNQRYREGKYRDAISLEHEILLHPRYFGPNLLNTVKQKLFTEVEGTCTGKYGFVIAVTTIDNIGAGVIQPGRGFVLYPVKYKAIVFRPFKGEVVDAVVTQVNKFQDPCAGYAGSLADSCLADRCLWDRLHAQPRLGTVPTFDWFFGYDEVQGLLLPLLQEAQAASPLRVLDVGCGTSSLCTGLYTKSPHPVDVLGVDFSPVAVAHMNSLLEGGPGQTPLCPGHPASSLHFMHADAQNLGAVASSGSFQLLLDKGTWDAVARGARGPAPELRLARGRPGRSPADPALSGSTDRELEWNRDYGSSGGKDQPAPNGDCVGAATLFPQAFLSPFISHEMGSELKKKLFKRRRVLNRERRLRHRVVGAVIDQGLITRHHLKKRANHQLLHPMARGGVQVAEQLGTQGLNLGPDTLLSRPWSTTLQYLPYCGPR

SEQ ID NO: 14107 - protein, 107 aa, Homo sapiens
  misc_feature (1)...(107): Xaa = X or * as defined in Table 2
FHNKCPRRLESLRQQISIFGMPENHLLKMQILRSAPDSLDFPCAGPLHLGEELLLHRVEQVGAEVARVQQDFVLXGDMVEHLPRPGRQAESTPPTVPGNPPETLRRR

SEQ ID NO: 14108 - protein, 46 aa, Homo sapiens
  misc_feature (1)...(46): Xaa = X or * as defined in Table 2
PSPELPEGDFEGFFPQKLQXSCLPTLQKKKNNNNNNNNNNNNNNEK

SEQ ID NO: 14109 - protein, 143 aa, Homo sapiens
  DOMAIN (33)..(143): SPRY domain identified by PFam, accession name SPRY, E-value= 0.00012, PFam score of 20.1
FQVSKDRYGGQPLFSEKFPTLWSGARSTYGVTKGKVCFEAKVTQNLPMKEGCTEVSLLRVGWSVDFSRPQLGEDEFSYGFDGRGLKAENGQFEEFGQTFGENDVIGCFANFETEEVELSFSKNGEDLGVAFWISKDSLADRLS

SEQ ID NO: 14110 - protein, 108 aa, Homo sapiens
VFPVDSQGLPEVWTLPAYLVWEDVLPCEQGSGWRQGLGGKEEQGQAPARDSPCRPITCQRLAWSPSHFSPQISLEHEILLHPRYFGPNLLNTVKQKLFTEVEGTCTGK

SEQ ID NO: 14111 - protein, 512 aa, Homo sapiens
  DOMAIN (249)..(295): SRP54-type proteins GTP-binding domain proteins domain identified by eMATRIX, accession number BL00300B, p-value=9.147e- 10, raw score of 20.56
  DOMAIN (43)..(215): SPRY domain identified by PFam, accession name SPRY, E-value= 7.1e-13, PFam score of 56.2
KPRFPRKIHATSVGHAVLPGVPLFSDSSLWPPVCLRLNREDTEIQISGLQGAGPGLVRAGAAILRPEEGGRDHIENAGCLGAAILREALYGKLRDVGAAMLVRPSWNGSGCGRSHLRYKIGSSRGEDEFSYGFDGRGLKAENGQFEEFGQTFGENDVIGCFANFETEEVELSFSKNGEDLGVAFWISKDSLADRALLPHVLCKNCVVELNFGQKEEPFFPPPEEFVFIHAVPVEERVRTAVPPKTIEECEVILMVGLPGSGKTQWALKYAKENPEKRYNVLGAETVLNQMRPRSNTVKVHCRPPMKANCSRLSVDCLSSVVKWSIKSVTDSTAAEPCKTSAPGVSSEKALHFRQLQRVLFELELLGRTGLRSNVLLPNDLQDWACTSHQHSHKRPSDSAAKAYFSVLCTSRCFSSFSTLMGDQCTVSHVSTGTHPSSTTATRSCGQGPAHAEVRGEWVNEQKEHSGSRRQISLEHEILLHPRYFGPNLLNTVKQKLLHRGGRGPGTGKYGLC

SEQ ID NO: 14112 - protein, 82 aa, Homo sapiens
  misc_feature (1)...(82): Xaa = X or * as defined in Table 2
GGALRLHQVPPALPLRGAVSGAAAVQGMSDCTPCCEVHLLQDXVPAGEARVQWHDLGSLQPPPPRFKRFSCLILPSSWDYRH

SEQ ID NO: 14113 - protein, 82 aa, Homo sapiens; identical to SEQ ID NO: 14112
  misc_feature (1)...(82): Xaa = X or * as defined in Table 2

SEQ ID NO: 14114 - protein, 112 aa, Homo sapiens
SFTLVAQAGVQWHDLGSLQPPPPRLKQFSCFNLPSSWDYRCPPPRLANFCIFNRDGFHHVGQAGLKLLTSSDPPTSASQSARTTGMSHHTRPSIFFFKRWGLTMLPRLVSNS

SEQ ID NO: 14115 - protein, 64 aa, Homo sapiens
LQTFWAVAVGSSRYLCFHVPFVCLEFVAVISLPKNHLLQSLDGEHSPARHPVLAVLPVPIPSFW

SEQ ID NO: 14116 - protein, 64 aa, Homo sapiens
LCFHLHFVCLEFVEVISLPKNDLLQRLDALVAEEHLTVDARVYSYALALKHANAKPFEVPFLKF

SEQ ID NO: 14117 - protein, 226 aa, Homo sapiens
  DOMAIN (107)..(123): MUTT DOMAIN SIGNATURE domain identified by eMATRIX, accession number PR00502B, p-value=9.206e-10, raw score of 15.92
  DOMAIN (77)..(123): Bacterial  mutT  protein domain identified by PFam, accession name mutT, E-value=0.00046, PFam score of 19.5
MESQEPTESSQNGKQYIISEELISEGKWVKLEKTTYMDPTGKARTWESVKRTTRKEQTRDGVAVIPVLQRTLHYECIVLVKQFRPPMGGYCIESPAGLIDDGETPRKQLLSRELEEETGLQRGPLPECSLPAVCMGPQACPNCTIHIVTVTPINGDDAENARPKPKSPGDGEFVEVISLPKNDLLQRLDALVAEEHPHSGTPRVYSYALALKHANAKPFEVPFLKF

SEQ ID NO: 14118 - protein, 63 aa, Homo sapiens
EMESHYVAQSGLKLLSSSKAPTLAFQSAWITDLNHDTWPWALLFIKFHILDFKSKPRNYLNKS

SEQ ID NO: 14119 - protein, 65 aa, Homo sapiens
  misc_feature (1)...(65): Xaa = X or * as defined in Table 2
KSCFFCLIRCYDSLPLPLLLNNFFFLGTESCSVAQAGVRWLNLSSSATSGLPGSINSPASASXAA

SEQ ID NO: 14120 - protein, 56 aa, Homo sapiens
PLSEDQRTALQEVYTLAEHRRTVAEAKKKIEQQGGFTFENKGVLSAFNFGTVPSNN

SEQ ID NO: 14121 - protein, 62 aa, Homo sapiens
RIFHIVENDLYIDFGGKFHCVCRRPEVDGESPISWYAVWRRFSQVMITCFSSNSDFGKHRKR

SEQ ID NO: 14122 - protein, 121 aa, Homo sapiens
MAALCRTRAVAAESHFLRVFLFFRPFRGVGTESGSESGSSNAKEPKTRAGGFASAYGAARRSFYRRWSPYRKVEPGRGSPKKCGILCIYAETILPLTTDGTLQTTKLVHWTGSFIFVENDL

SEQ ID NO: 14123 - protein, 67 aa, Homo sapiens
TFLRRWGFTILPRLFLNSWAQEICLPWPPACLGITGMSHCAQSSWLFKNNFKFLWFQRARDHKPSHS

SEQ ID NO: 14124 - protein, 122 aa, Homo sapiens
  misc_feature (1)...(122): Xaa = X or * as defined in Table 2
SFLCLVSCFSNFSXNCSRPVFSLSLKFDFVFVLFCDGVLLCHPGWIAVAQSRLTTASTSRIKRFSCLTIRSSWDYRRPPPCPADFCIFSRDRGFTMLARLVWNSXPQVICPPPPPKVLGLQA

SEQ ID NO: 14125 - protein, 208 aa, Homo sapiens
NSTTIMSRHSLVSIEEEGLDMVNRETAHEREMQTAMQISQSWDESLSLSDSDFDKPEKLYSPKRIDFTPVSPAPSPTRGFGKMFREQQWIATKSSSQSKTDFQAGEVRVQVKCIKTQVFLGPLKKKKVKWRPESQPQETLSKGTTNMLSPDAAQLSDLSSCSDILDGSSSSSGLSSDPLAKGSATAESPVACSNSCSSFILMDDLSPK

SEQ ID NO: 14126 - protein, 75 aa, Homo sapiens
ILNVLTTTKNDKYVRFLTTVDVPHRKSFSFKMCSCPMGSSCPLHKKISSWRPWQNSFQIQEKSGREKQICSKFCS

SEQ ID NO: 14127 - protein, 26 aa, Homo sapiens
DRVSQCCLGWCQTPRLKRSSGPHPPE

SEQ ID NO: 14128 - protein, 26 aa, Homo sapiens
KGREGVHQIRRNEKRRWERRERERGS

SEQ ID NO: 14129 - protein, 78 aa, Homo sapiens
GTRVLLSEGWQRQKYCLNPGGRGCNELRSHHCTQAWATEQDCVSKKPNQTKTKIHEQVDLPSSNHCCSKGSIVYYFHW

SEQ ID NO: 14130 - protein, 418 aa, Homo sapiens; identical to SEQ ID NO: 8354
  DOMAIN (90)..(122): GTP-binding elongation factors proteins domain identified by eMATRIX, accession number BL00301B, p-value=5.500e-31, raw score of 20.09
  DOMAIN (5)..(373): Elongation factor Tu family domain identified by PFam, accession name GTP_EFTU, E-value=5.6e-138, PFam score of 467.7

SEQ ID NO: 14131 - protein, 40 aa, Homo sapiens
YLPMVKTGAKKLSILATFKSKLVNSPRDWLGWFLGSCGNS

SEQ ID NO: 14132 - protein, 127 aa, Homo sapiens
DFADFGTTIKQDFRLLGQTSVDRLLQLSQGQAVKGNQLLPVSLFVTLFVGGVRGFSILLSAEVFKHDSAVWYLDGSIGVLIGLTIFAYGVKEFMSTELGQLDQLWKFDQLPKGHSMVNFTRGPNDGR

SEQ ID NO: 14133 - protein, 148 aa, Homo sapiens
AAAVHSAHREYIACVILGVIFLLSSICIVVKAIHDLSTRLLPEVDDFLFSVSILSGILCSILAVLKFMLGKVLTSRALITDGFNSLVGGVMGFSILLSAEVFKHDSAVWYLDGSIGVLIGLTIFAYGVKLLIDMVPRVRQTRHYEMFE

SEQ ID NO: 14134 - protein, 93 aa, Homo sapiens
  DOMAIN (10)..(77): TPR Domain domain identified by PFam, accession name TPR, E- value=4.5e-07, PFam score of 36.9
RWIAADAANALLPANRAMAYLKIQKYEEAEKDCTQAILLDGSYSKAFARRGTARTFLGKLNEAKQDFETVLLLGTWEIRQAVTELSKIKKGIN

SEQ ID NO: 14135 - protein, 329 aa, Homo sapiens
  DOMAIN (75)..(96): PROTEIN REPEAT DOMAIN TPR NUCLEA domain identified by eMATRIX, accession number PD00126A, p-value=6.824e-14, raw score of 22.53
  DOMAIN (68)..(169): TPR Domain domain identified by PFam, accession name TPR, E- value=1.4e-18, PFam score of 75.2
LEEFAAKKDYERVLELEPNNFEATNELRKISQALASKENSYPKEADIVIKSTEGERKQIEAQQNKQQAISEKDRGNGFFKEGKYERAIECYTRGIAADGANALLPANRAMAYLKIQKYEEAEKDCTQAILLDGSYSKAFARRGTARTFLGKLNEAKQDFETVLLLEPGNKQAVTELSKIKKKPLKKVIIEETGNLIQTIDVPDSTTAAAPENNPINLANVIAATGTTSKKNSSQDDLFPTSDTPRAKVLKIEEVSDTSSLQPQASLKQDVCQSYSEKMPIEIEQKPAQFATTVLPPIPANSFQLESDFRQLKSSPDMLYQYLKQIEPSL

SEQ ID NO: 14136 - protein, 106 aa, Homo sapiens
  DOMAIN (57)..(91): IMMUNOGLOBULIN V REGION domain identified by eMATRIX, accession number DM00031B, p-value=9.772e-09, raw score of 15.41
  DOMAIN (16)..(90): Immunoglobulin domain identified by PFam, accession name ig, E-value=7.9e-12, PFam score of 43.2
DIVMTQSPSTLSASVGDRVTITCRASQSISSWLAWYQQKPGKAPKLLIYKASSLESGVPSRFSGSGSGTEFALTISSLQPDDFATYYCQHRGAFGQGTKVEIKRAA

SEQ ID NO: 14137 - protein, 132 aa, Homo sapiens
  DOMAIN (75)..(109): IMMUNOGLOBULIN V REGION domain identified by eMATRIX, accession number DM00031B, p-value=9.544e-09, raw score of 15.41
  DOMAIN (34)..(108): Immunoglobulin domain identified by PFam, accession name ig, E-value=1.3e-12, PFam score of 45.7
VPAQLLGLLLLWLPGAKCDIQMTQSPSTLSASVGDRVTITCRASQSISSWLAWYQQKPGKAPKLLIYKASSLESGVPSRFSGSGSGTEFTLTISSLQPDDFATYYCQQYNSYSRITFGQGTRLEIKRTVAAP

SEQ ID NO: 14138 - protein, 26 aa, Homo sapiens
SVTSIEERTRPILSKTLKGILHKGIY

SEQ ID NO: 14139 - protein, 115 aa, Homo sapiens
  DOMAIN (7)..(19): NEPRILYSIN METALLOPROTEASE (M13) FAMILY SIGNATURE domain identified by eMATRIX, accession number PR00786D, p-value=2.286e- 15, raw score of 9.78
GRHTLGENIADNGGLKAAYRAYQNWVKKNGAEHSLPTLGLTKKKEKRNSCHLPQDPNPLSEHRHPPHGWAWLPGPVQSSSALSEAAAAQSPPQGRTAPAPRMPLASAVQPPGVLY

SEQ ID NO: 14140 - protein, 69 aa, Homo sapiens
PSREKEKFLQDITDAEKYFIGLIYHREEKRWRWINNSVFNGKYVNMPQFPGDLGLLQKTKPEIAGFTLE

SEQ ID NO: 14141 - protein, 488 aa, Homo sapiens
  DOMAIN (14)..(26): GTP-binding elongation factors proteins domain identified by eMATRIX, accession number BL00301A, p-value=3.842e-13, raw score of 12.41
  DOMAIN (11)..(457): Elongation factor Tu family domain identified by PFam, accession name GTP_EFTU, E-value=1.2e-83, PFam score of 284.5
PLKAKMGKEKTHINIVVIGHVDSGKSTTTGHLIYKCGGIDKRTIEKFEKEAAEMGKGSFKYAWVLDKLKAERERGITIDISLWKFETSKYYVTYPFDAPGHRDFYPKTWITGDIFRLDWFGGPPFWGGSPLIVAAGVGEFEAGYLPRNGADPERHALLAYTLGCETTKLSGVNKNGIPLEPTPTAQKKILKEIVKGKSALTLRKIGYNPDTSSILCPISGWNGDNMLEPSANMPWFQGDGKVTRKDGNASGTTLLEALDCILPPTRPTDKPLGLPLQDVYKIGGIGTVPVGRVETGVLKPGMVVTFGPVNVTTEVKSVEMHHEALGEALPGDNVGFNVKNVSVKDVRRGNVAGDSKNDPPMEAAGFPAQVIILNHPGQISAGYAPVLDCHTAHIACKFAELKEKIDRRSGKKLEDGPKFLKSGDAAIVDMVPGKPMCVESFSDYPPLGCFAVRDMRQTVAVGVIKAVDKKAAGAGKVTKSAQKAQKAK

SEQ ID NO: 14142 - protein, 45 aa, Homo sapiens
PRVRCHYDAGDCCSSTLSSKKVIPFAADCDLDECTCRDPKAEENQ

SEQ ID NO: 14143 - protein, 44 aa, Homo sapiens
RQGLPLVAQDGLELLGSSNPPTLASQSAEITRHEPLCPNLSRMT

SEQ ID NO: 14144 - protein, 137 aa, Homo sapiens
HASETLLFISNDKKVVGCLIAEHIQWGYRVIEEKLPVIRSEEEKVRFERQKAWCCSTLPEPAICGISRIWVFSMMRRKKIASRMIECLRSNFIYGSYLSKEEIAFSDPTPDGKLFATQYCGTGQFLVYNFINGQNST

SEQ ID NO: 14145 - protein, 83 aa, Homo sapiens
NSSLRKLYPNSGKAQFLLNHTLVPGLCIGLLLHVNLLLLPGNVDTWLPGVQRPWHLGGFELDRSLETKASRSSGCRESQKGRT

SEQ ID NO: 14146 - protein, 42 aa, Homo sapiens
TTTALGLLTIPIIIHPIDRSVDFLLDSSLRKLYPTVGKPSSS

SEQ ID NO: 14147 - protein, 530 aa, Homo sapiens
MVTVTQCSVRPQWPESEVGIMAPVYISEREAQRGYANEVGEAFRSLVPAAVVWLSYGVASSYVLADAIDKGKKAGEVPSPEAGRSARVTVAVVDTFVWQALASVAIPGFTINRVCAASLYVLGTATRWPLAVRKWTTTALGLLTIPIIIHPIDRDHPLSSDESGSSSLQVGGFPPGLQPAQALPNSGEAQLLLIILWYLACASASCFMSTSYSCQGMWTPGSLVSKDPGTWLREVERWEHRAEADLGPSQPCPKHQISSHQDPGPIPCSPVPAIPGYEVFTAPFKAYGFIQLVRGLLEAHEDKAAKSQGVPGRFGGEELGCLGWKEGCLVNGKNFHSHFVPQEVPKRLELSFQAFSFTGTPADVPSDATKKACSFHRGTHGWYTCTLSHVNNMVLGNGGCHPVSSLPLLVHFLPLLVHFLPLLVYLLPLLGRFLPRLVYLLPLLVHFLPPLMHFLPLLVHFLALLAHFLPLLVHFLALLAHFLPLLVYFLPLLVYFLPLLVHFLPLLAHFLPLQALPSLSLLYMEVFPVH

SEQ ID NO: 14148 - protein, 198 aa, Homo sapiens
GTRRLAPTAQRKRDENQSVKPEPGRGASVRGGNLQTLPAGGDFLTCPSARDFRRVPAGQTQVPAAETAVEPVPAVVAGARGGRVMSEPQPRGAERDLYRDTWVRYLGYANEVGEAFRSLVPARVVWLSYGVASSYVLADAIDKGKEELERCPALEASRSARVTVAVVDTFVWQALASVAIPGFTINRVCAASLYVLGT

SEQ ID NO: 14149 - protein, 150 aa, Homo sapiens
GGDCSGASTGCSGRGRGGRVMSEPQPRGAERDLYRDTWVRYLSYANEVGEAFRSLVPAAVVWLSYGVASSYVLADAIDKGKKAGEDGGFPPGLQPAQALPNRWGSPAPPDHTLVPGLCIGLLLHVNLLLLPGNVDTWLPGVQRPWQPGWV

SEQ ID NO: 14150 - protein, 88 aa, Homo sapiens
EEGKAGAAGGGGGSCGAGSREQPSSHNCGGGVRESGRRDSSPPSSPPRLRGASAHRRDPPPRFLRLLSPLLGDGPTRPPPCAAAALRS

SEQ ID NO: 14151 - protein, 49 aa, Homo sapiens
KDHAAFFTIPKRWRQPSSPSIDEWRNIMWSSHTVEYYTAMKRNKQLYSQ

SEQ ID NO: 14152 - protein, 114 aa, Homo sapiens
  misc_feature (1)...(114): Xaa = X or * as defined in Table 2
KAAGKRGDFKTEGAYQRQRTIFKNKKRARREKTGRENLRGNYKNMGRGLKTPRGALGGPYLDKKGPLRGKGPFQGGTLLSSSPKIKIQGTLXIRRNYWPYIRRYNRFKKRQKNM

SEQ ID NO: 14153 - protein, 75 aa, Homo sapiens
DRFCVAEAEVQRYDHSSVQKPRPPMLKLSSCLSLPSNWDYEITGAPPHPANFLTFCRDKGLTLCCPGWSQTRGLQ

SEQ ID NO: 14154 - protein, 96 aa, Homo sapiens
ALIYWQRKISIWPALTQVAIQYLSCPMCSWQSECIFTKNSHFHPKQIMSLDFDNIEQLMFLKMNLKNVNYDYSTLVLSWDPEQNEVVQSSEKEILP

SEQ ID NO: 14155 - protein, 295 aa, Homo sapiens
MDDFLQKLRQKIKIGVVGGSDFEKVQEQLGNDAFKPQSDRSSYCPSDSPPHLPITETESPAQDPEKPERLIDPFTGESDLIGLYLQSYSLYDVNDDDASATRVMRCQTRYDSVLLLEIVSYKIIGVHQEDELLECLSPATSRTFRIEEIPLDQVDIDKENEMLVTVAHFHKEVFGTFGIPFLLRIHQFKIAIVMMDRHQYINEDEYEVNLKDFEPQPVCSAKETGLSAQLCSTMQVEVAARTGRNRAAQMQLGQGMPLPGWRSVTHKSQRINTENAGPQCHEKHKRLTNRLHLPR

SEQ ID NO: 14156 - protein, 52 aa, Homo sapiens
GVPGLLCGLTCFSSSPPGNMSHPRPWLGLDHFNKAPKRSRYTYLEKAIKIHN

SEQ ID NO: 14157 - protein, 1057 aa, Homo sapiens
  DOMAIN (229)..(247): Ubiquitin carboxyl-terminal hydrolases family 2 proteins domain identified by eMATRIX, accession number BL00972A, p-value= 3.483e-17, raw score of 11.93
  DOMAIN (88)..(211): MATH domain identified by PFam, accession name MATH, E-value= 2.9e-28, PFam score of 107.1
PRPPAAGEAQAAADMNHQQQQQQQKAGEQQLSEPEDMEMEAGDTDDPPRITQNPVINGNVALSDGHNTAEEDMEDDTSWRSEATFQFTVERFSRLSESVLSPPCFVRNLPWKIMVMPRFYPDRPHQKSVGFFLQCNAESDSTSWSCHAQAVLKIINYRDDEKSFSRRISHLFFHKENDWGFSNFMAWSEVTDPEKGFIDDDKVTFEVFVQADAPHGVAWDSKKHTGYVGLKNQGATCYMNSLLQTLFFTNQLRKAVYMMPTEGDDSSKSVPLALQRVFYELQHSDKPVGTKKLTKSFGWETLDSFMQHDVQELCRVLLDNVENKMKGTCVEGTIPKLFRGKMVSYIQCKEVDYRSDRREDYYDIQLSIKGKKNIFESFVDYVAVEQLDGDNKYDAGEHGLQEAEKGVKFLTLPPVLHLQLMRFMYDPQTDQNIKINDRFEFPEQLPLDEFLQKTDPKDPANYILHAVLVHSGDNHGGHYVVYLNPKGDGKWCKFDDDVVSRCTKEEAIEHNYGGHDDDLSVRHCTNAYMLVYIRESKLSEVLQAVTDHDIPQQLVERLQEEKRIEAQKRKERQEAHLYMQVQIVAEDQFCGHQGNDMYDEEKVKYTVFKVLKNSSLAEFVQSLSQTMGFPQDQIRLWPMQARSNGTKRPAMLDNEADGNKTMIELSDNENPWTIFLETVDPELAASGATLPKFDKDHDVMLFLKMYDPKTRSLNYCGHIYTPISCKIRDLLPVMCDRAGFIQDTSLILYEEVKPNLTERIQDYDVSLDKALDELMDGDIIVFQKDDPENDNSELPTAKEYFRDLYHRVDVIFCDKTIPNDPGFVVTLSNRMNYFQVAKTVAQRLNTDPMLLQFFKSQGYRDGPGNPLRHNYEGTLRDLLQFFKPRQPKKLYYQQLKMKITDFENRRSFKCIWLNSQFREEEITLYPDKHGCVRDLLEECKKAVELGEKASGKLRLLEIVSYKIIGVHQEDELLECLSPATSRTFRIEEIPLDQVDIDKENEMLVTVAHFHKEVFGTFGIPVFAEDTPGRAFSRSDEANPEPAGHQGEGVLRSLNLQL

SEQ ID NO: 14158 - protein, 48 aa, Homo sapiens
GWDPLRPHNFLPRWTCTQSSISPQYNICEQMVQTSDDLLRFIFQLARS

SEQ ID NO: 14159 - protein, 266 aa, Homo sapiens
  DOMAIN (59)..(95): Tobacco mosaic virus coat domain identified by eMATRIX, accession number PF00721A, p-value=8.031e-09, raw score of 14.59
  DOMAIN (144)..(232): C2 domain identified by PFam, accession name C2, E-value= 0.087, PFam score of 5.3
GRLNVKLLYNSSVEQIWITVLQCRDLSWPSSYGDTPTVSIKGILTLPKPVHFKSSAKEGSNAIEFMETFVFAIKLQNLQTVRLGFKIQTQTPRKKTIGECSMSLRTLSTQEMDYSLDITPPSKISVCHAELELGTCFQAVNSRIQLQILEARYLPSSSTPLTLSFFVKVGMFSSGELIYKKKTRLLKASNGRVKWGETMIFPLIQSEKEIVFLIKLYSRSSVRRKHFVGQIWISEDSNNIEAVNQWKETVINPEKVVIRWHKLNPS

SEQ ID NO: 14160 - protein, 156 aa, Homo sapiens
  DOMAIN (32)..(46): LEUCINE-RICH REPEAT SIGNATURE domain identified by eMATRIX, accession number PR00019B, p-value=4.960e-09, raw score of 11.36
  DOMAIN (12)..(82): Leucine Rich Repeat domain identified by PFam, accession name LRR, E-value=0.0095, PFam score of 22.6
PRVRPRVRSLAALLVLILRGNELRSLHGLKQLRNLRHLDLAYNLLEGHRELSPLWLLAELRKLYLEGNPLWFHLEHRAATAQYLSPRARDAATGFLLDGKVLSLTDFQTHTSLGLSPMGPPLPWPVGSTPETSGGPDLSDSLSSGGVVTQPLGAGQ

SEQ ID NO: 14161 - protein, 66 aa, Homo sapiens
GEQACTHTWGARTHMRPHMCTHTHTGTCTHAHARTHMHTYTHMCTHAWLGRLHLRVMNAPFSLVHS

SEQ ID NO: 14162 - protein, 61 aa, Homo sapiens
  misc_feature (1)...(61): Xaa = X or * as defined in Table 2
EHSTLKLPYHTQEAGAAPGPTGTDSHEVDHLEGGAGKEAGPCAXSLGTMVAPVRSNSGSPE

SEQ ID NO: 14163 - protein, 125 aa, Homo sapiens
  misc_feature (1)...(125): Xaa = X or * as defined in Table 2
AGAAAIGEPMAXRGEGHPPWSVDERADSTNVNNWHWTERDASHWSTDKLKTLFLAMHVQNEERNGEATEVSKLDGEASINNRIGKLMFFYEWGVTLDWTGASXSGVPYKGHVEIPYLADENCVDE

SEQ ID NO: 14164 - protein, 174 aa, Homo sapiens
VLSFSFVFYTFGNIILRIVHRLNQTAKGTMAPKWLQAMVQRDHWREPWRLLSLHVPAHLGADLPTLVTRVYISLYASHQLTLLRGPLLNSWFLYPSGNVYKFQTGSRFHAILWHKHLDDACKSNRPQEAGAAPGPTGTDSHEVDHLEGGAGKEAGPCALKAWAPMVAPSQEQQW

SEQ ID NO: 14165 - protein, 276 aa, Homo sapiens
MKDWRPRRKKWFPGPGPGPHCCEEPRDLVSYILAAPAMAKRGQGRARVVVSEGAAWQLPHGVEPVGAQKSRTKLNNTVQEFHNAITSINSRINQAEERISELENWLSEIRQSDKNKEKRIKRNEQNLQEVGDYVKKPNLQITVIPERKGEKANSLENVFQYIVHENFHNLAREDNSQIQEIQTTPARFYTGRSSPRHIIVRFSKDPDSLEGDLHRLRINLLWHSATHKYRLHLGFSSVGLLAASDEGLFKGFHGGPLTLTLGFKLVVNRFDPGIYT

SEQ ID NO: 14166 - protein, 89 aa, Homo sapiens
NMPTKLQKLDLSSYPEATEKNVERILGLLQTYFRKYPDTPVSYFEFVIDPNSFSRTVENIFYVSFIVRDGFARIRLDEDRLPNIRADEC

SEQ ID NO: 14167 - protein, 37 aa, Homo sapiens
KGLLDVTCKTVANMIKGKTPEEIRKTFNIKNDFPSFL

SEQ ID NO: 14168 - protein, 72 aa, Homo sapiens
  DOMAIN (2)..(72): Skp1 family domain identified by PFam, accession name Skp1, E -value=1.4e-22, PFam score of 88.5
MPSIKLQSSDGEIFEVDVEIAKQSVTIKTMLEDLGMDDEGDDDPVPLPNVNAAILKKVIQWCTHHKDDPPSS

SEQ ID NO: 14169 - protein, 64 aa, Homo sapiens
NGYLVFPRKNSFLLIFGLFVYLETNLDSLPLVDTHSKRTLLIKTVETRDGQVINETSQHHDDLE

SEQ ID NO: 14170 - protein, 498 aa, Homo sapiens
  DOMAIN (239)..(287): Intermediate filaments proteins domain identified by eMATRIX, accession number BL00226B, p-value=6.824e-40, raw score of 23.86
  DOMAIN (142)..(336): Intermediate filament proteins domain identified by PFam, accession name filament, E-value=5.8e-93, PFam score of 322.2
  misc_feature (1)...(498): Xaa = X or * as defined in Table 2
ARQRRSRAPTTHTHRALVRLFSGSQSAPPPPPRPSPPSAAMSTRSVSSSSYRRMFGGPGTASRPSSSRSYVTTSTRTYSLGSALRPSTSRSLYASSPGGVYATRSSAVRLRSSVPGVRLLQDSVDFSLADAINTEFKNTRTNEKVELQELNDRFANYIDKVRFLEQQNKILLAELEQLKGQGKSRLGDLYEEEMRELRRQVDQLTNDKARVEVERDNLAEDIMRLREKLQEEMLQREEAENTLQSFRQDVDNASLARLDLERKVESLQEEIAFLKKLHEEEIQELQAQIQEQHVQIDVDVSKPDLTASLRDVRQQYESVAAKNLQEAEEWYKCQVCXPLLRASNRNNEPLRQAKQESTELPENRVQSLTCEVDALXRKPMSSLERQLREMEENFCAVKAANYPRPLLARLQDEIQNYXRREMASLTFVEYQXPALNVKMAPXHLRFATLQEMLLGRRGERGFPLASFPNFSLPXTLRGNLIWDSLPSGLIPHSKRDTS

SEQ ID NO: 14171 - protein, 76 aa, Homo sapiens
FEAESYSVTQAGVQWHDLSSLQPPPPRIKQLSYLSLQSSCDYRHLPPCPANFCIFSRNGASPCWPCWSRTPARWIH

SEQ ID NO: 14172 - protein, 43 aa, Homo sapiens
DSWSEQVIKPPFQRGSCPIPRRKECCSERPRRIWTDRPCVVFS

SEQ ID NO: 14173 - protein, 64 aa, Homo sapiens
LIMICFSFFLLSVLENKNSGPYLFFQRQFWSSVKVRVHRLSKRLRFRLTSYITFFRVFCFLLTP

SEQ ID NO: 14174 - protein, 107 aa, Homo sapiens
REMDLQVHNAMDQLEQRVSEFFMNAKKNIPEWREEQMASIKKDYYKALEDADEKVQLADQIYDLRSLELDTPSQPVNNHHAHSHTPAEKRKYNPTSHHTTTDHIPEK

SEQ ID NO: 14175 - protein, 998 aa, Homo sapiens
MAQVAMSTLPVEDEESSESRMVVTFLMSALESMCKELAKSKAEVACIAVYETDVFVVGTERGRAFVNTRKDFQKDFVKYCVEEEEKAAEMHKMKSTTQANRMSVDAVEIETLRKTVEDYFCFCYGKALGKSTVVPVPYEKMLRDQSAVVVQGLPEGVAFKHPENYDLATLKWILENKAGISFIIKRPFLEPKKHVGGRVMVTDADRSILSPGGSCGPIKVKTEPTEDSGISLEMAAVTVKEESEDPDYYQYNIQAGPSETDDVDEKQPLSKPLQGSHHSSEGNEGTEMEVPAEDSTQHVPSETSEDPEVEVTIEDDDYSPPSKRPKANELPQPPVPEPANAGKRKVREFNFEKWNARITDLRKQVEELFERKYAQAIKAKGPVTIPYPLFQSHVEDLYVEGLPEGIPFRRPSTYGIPRLERILLAKERIRFVIKKHELLNSTREDLQLDKPASGVKEEWYARITKLRKMVDQLFCKKFAEALGSTEAKAVPYQKFEAHPNDLYVEGLPENIPFRSPSWYGIPRLEKIIQVGNRIKFVIKRPELLTHSTTEVTQPRTNTPVKEDWNVRITKLRKQVEEIFNLKFAQALGLTEAVKVPYPVFESNPEFLYVEGLPEGIPFRSPTWFGIPRLERIVRGSNKIKFVVKKPELVISYLPPGMASKINTKALQSPKRPRSPGSNSKVPEIEVTVEGPNNNNPQTSAVRTPTQTNGSNVPFKPRGREFSFEAWNAKITDLKQKVENLFNEKCGEALGLKQAVKVPFALFESFPEDFYVEGLPEGVPFRRPSTFGIPRLEKILRNKAKIKFIIKKPEMFETAIKESTSSKSPPRKINSSPNVNTTASGVEDLNIIQVTIPDDDNERLSKVEKARQLREQVNDLFSRKFGEAIGMGFPVKVPYRKITINPGCVVVDGMPPGVSFKAPSYLEISSMRRILDSAEFIKFTVIRPFPGLVINNQLVDQSESEGPVIQESAEPSQLEVPATEEIKETDGSSQIKQEPDPTW

SEQ ID NO: 14176 - protein, 91 aa, Homo sapiens
TGIPVNSYRVKINWYTLQFVSLFRPFPGLVINNQLADQSESEGPVIQESAEPSQLEVPATEEIKETDGSSQIKQEPDPTWETSFLLGEISF

SEQ ID NO: 14177 - protein, 978 aa, Homo sapiens
MAQVAMSTLPVEDEESSESRMVVTFLMSALESMCKELAKSKAEVACIAVYETDVFVVGTERGRAFVNTRKDFQKDFVKYCVEEEEKAAEMHKMKSTTQANRMSVDAVEIETLRKTVEDYFCFCYGKALGKSTVVPVPYEKMLRDQSAVVVQGLPEGVAFKHPENYDLATLKWILENKAGISFIIKRPFLEPKKHVGGRVMVTDADRSILSPGGSCGPIKVKTEPTEDSGISLEMAAVTVKEESEDPDYYQYNIQGSHHSSEGNEGTEMEVPAEDSTQHVPSETSEDPEVEVTIEDDDYSPPSKRPKANELPQPPVPEPANAGKRKVREFNFEKWNARITDLRKQVEELFERKYAQAIKAKGPVTIPYPLFQSHVEDLYVEGLPEGIPFRRPSTYGIPRLERILLAKERIRFVIKKHELLNSTREDLQLDKPASGVKEEWYARITKLRKMVDQLFCKKFAEALGSTEAKAVPYQKFEAHPNDLYVEGLPENIPFRSPSWYGIPRLEKIIQVGNRIKFVIKRPELLTHSTTEVTQPRTNTPVKEDWNVRITKLRKQVEEIFNLKFAQALGLTEAVKVPYPVFESNPEFLYVEGLPEGIPFRSPTWFGIPRLERIVRGSNKIKFVVKKPELVISYLPPGMASKINTKALQSPKRPRSPGSNSKVPEIEVTVEGPNNNNPQTSAVRTPTQTNGSNVPFKPRGREFSFEAWNAKITDLKQKVENLFNEKCGEALGLKQAVKVPFALFESFPEDFYVEGLPEGVPFRRPSTFGIPRLEKILRNKAKIKFIIKKPEMFETAIKESTSSKSPPRKINSSPNVNTTASGVEDLNIIQVTIPDDDNERLSKVEKARQLREQVNDLFSRKFGEAIGMGFPVKVPYRKITINPGCVVVDGMPPGVSFKAPSYLEISSMRRILDSAEFIKFTVIRPFPGLVINNQLVDQSESEGPVIQESAEPSQLEVPATEEIKETDGSSQIKQEPDPTW

SEQ ID NO: 14178 - protein, 29 aa, Homo sapiens
LIGTVLFLLIEIKETDGSSQIKQEPDPTW

SEQ ID NO: 14179 - protein, 958 aa, Homo sapiens
MAQVAMSTLPVEDEESSESRMVVTFLMSALESMCKELAKSKAEVACIAVYETDVFVVGTERGRAFVNTRKDFQKDFVKYCVEEEEKAAEMHKMKSTTQANRMSVDAVEIETLRKTVEDYFCFCYGKALGKSTVVPVPYEKMLRDQSAVVVQGLPEGVAFKHPENYDLATLKWIGENKGGISFIIKRPFLEPKKHVGGRVMVTDADRSILSPGGSCGPIKVKTEPTEDSGISLEMAAVTVKEESEDPDYYQYNIQGSHHSSEGNEGTEMEVPAEDDDYSPPSKRPKANELPQPPVPEPANAGKRKVREFNFEKWNARITDLRKQVEELFERKYAQAIKAKGPVTIPYPLFQSHVEDLYVEGLPEGIPFRRPSTYGIPRLERILLAKERIRFVIKKHELLNSTREDLQLDKPASGVKEEWYARITKLRKMVDQLFCKKFAEALGSTEAKAVPYQKFEAHPNDLYVEGLPENIPFRSPSWYGIPRLEKIIQVGNRIKFVIKRPELLTHSTTEVTQPRTNTPVKEDWNVRITKLRKQVEEIFNLKFAQALGLTEAVKVPYPVFESNPEFLYVEGLPEGIPFRSPTWFGIPRLERIVHGSNKIKFVVKKPELVISYLPPGMASKINTKALQSPKRPRSPGSNSKVPEIEVTVEGPNNNNPQTSAVRTPTQTNGSNVPFKPRGREFSFEAWNAKITDLKQKVENLFNEKCGEALGLKQAVKVPFALFESFPEDFYVEGLPEGVPFRRPSTFGIPRLEKILRNKAKIKFIIKKPEMFETAIKESTSSKSPPRKINSSPNVNTTASGVEDLNIIQVTIPDDDNERLSKVEKASQLREDQVNDLFSRKFGEAIGMGFPVKVPYRKITINPGCVVVDGMPPGVSFKAPSYLEISSMRRILDSAEFIKFTVIRPFPGLVINNQLVDQSESKGPVIQESAEPSQLEVPATEEIKETDGSSQIKQEPDPTW

SEQ ID NO: 14180 - protein, 111 aa, Homo sapiens
PTRPPTRPPTRPLFSPLVKDWAPKAFIISFKLETDPAIVINRARKALEIYQHQVGGANILESRQSFVFIVTKDSETKLLLSEEEIEKGVEIEEKIVDNLQSRHTAFIGDRN

SEQ ID NO: 14181 - protein, 146 aa, Homo sapiens
VIVHARPIRTRASKYYIPEAVYGLPAYPAYAGGGGFVLSGATLHRLAGACAQVELFPIDDVFLGMCLQRLRLTPEPHPAFRTFGIPQPSAAPHLSTFDPCFYRELVVVHGLSAADIWLMWRLLHGPHGPPCAHPLPVAAGPFQWDS

SEQ ID NO: 14182 - protein, 297 aa, Homo sapiens
REPGAFSVLFKEPQAIINYFSSLMQQRVQEKGETAEVNEENRIQSTEKKNLAQKNDKPGTPGVKRSSHLSLSVLGLRTRSTSRSRIPAFKADGREQGQGDIPTFYTYEEGLSHLTAEGQATLERLEGMLSQSVSSQYNMAGVRTEDSIRDYEGGWSPGPRETCDPRCRRENFSPEGKSALRDPAPLPSSATDPERSYRMILETAHFRNHGWFRGGTSILISHTGSEVRGEEQLAGSRSFEGAEPETNTFCPSQGLPLVAIVGGGPAHSHHTLNGHATGALDDGPFCQGPLDRPLREI

SEQ ID NO: 14183 - protein, 265 aa, Homo sapiens
LPLPGRAVWCTHCCAPTPSGPVLPHSAAMSFLKSFPPPGPAEGLLRQQPDTEAVLNGKGLGTGTLYIAESRLSWLDGSGLGFSLEYPTISLHALSRDRSDCLGEHLYVMVNAKFEEESKEPVADEEEEDSDDDVEPITEFRFVPSDKSALEAMFTAMCECQALHPDPEDEDSDDYDGEEYDVEAHEQGQGDIPTFYTYEEGLSHLTAEGQATLERLEGMLSQSVSSQYNMAGVRTEDSIRDYEDGDGRLDTTPTVCLGQFEDADV

SEQ ID NO: 14184 - protein, 59 aa, Homo sapiens
  misc_feature (1)...(59): Xaa = X or * as defined in Table 2
XALNGLSAQDNWAKLQRDYPDALITNYYLWPAVQLANFYLVPLHYREDPASTTLVSDPT

SEQ ID NO: 14185 - protein, 77 aa, Homo sapiens
  DOMAIN (6)..(34): !!!! PROTEIN ALU SUBFAMILY WARNING ENTRY NUCLEAR PHOSPHO domain identified by eMATRIX, accession number PD02454B, p-value= 3.893e-22, raw score of 11.61
  misc_feature (1)...(77): Xaa = X or * as defined in Table 2
SQHFERSGDQHHPGQHGETLSLLKMQKLAGCGGMRLXSQLLGRLRQENLLNPGGRGCSKPRSHHCTPAWVTQQDSIS

SEQ ID NO: 14186 - protein, 164 aa, Homo sapiens
AKKNKPEWREEQMASIKKDYYKALEDADEKVLLSNQIYDLVDRGGRKLDQELAKFKMELEADNAGITEILERRSLELDTPSQPVNNHHAHSHTPVEKRKYNPTSHHTTTDHIPEKKFKSEALLSTLTVRCLLRENTLGCRNNNSTASSNNAYNVNSSQPLGSYN

SEQ ID NO: 14187 - protein, 109 aa, Homo sapiens
HGKPFRWDYSFIPRMGTINREAITQLFTFFLCAEVGVGPGKTVSLGSGGGAAIQPLHFLLQLWPAVQLANFYLVPLHYRYVAPLPHPSRKTHVTNSWRQNDSHFNLELP

SEQ ID NO: 14188 - protein, 125 aa, Homo sapiens
  DOMAIN (27)..(65): Somatotropin prolactin and related hormones proteins. domain identified by eMATRIX, accession number BL00266B, p-value=3.700e- 19, raw score of 24.48
  DOMAIN (6)..(104): Somatotropin hormone family domain identified by PFam, accession name hormone, E-value=3.3e-26, PFam score of 71.6
  misc_feature (1)...(125): Xaa = X or * as defined in Table 2
RQWLQEEAYITKEQKYSFLHDSQTSFCFSDSIPTSSNMEETQQKSNLELLHISLLLNQSRLEPVRFLRSTFTNNLVYDNSDSDDYQLLKDLEGGIQMLMGRLEAATNXLGGPQANYNKFDKTRTT

SEQ ID NO: 14189 - protein, 138 aa, Homo sapiens
  DOMAIN (78)..(116): Somatotropin prolactin and related hormones proteins. domain identified by eMATRIX, accession number BL00266B, p-value=4.000e- 29, raw score of 24.48
  DOMAIN (8)..(125): Somatotropin hormone family domain identified by PFam, accession name hormone, E-value=1.5e-58, PFam score of 158.8
  misc_feature (1)...(138): Xaa = X or * as defined in Table 2
XPGSRTSLLLAFALLCLPWLQEAGAVQTVPLSRLFDHAMLQAHRAHQLAIDTYQEFEETYIPKDQKYSFLHDSQTSFCFSDSIPTPSNMEETQQKSNLELLRISLLLIESWLEPVRFLRSMFATTWCMTPRTAMTITS

SEQ ID NO: 14190 - protein, 199 aa, Homo sapiens
  DOMAIN (161)..(178): SOMATOTROPIN HORMONE FAMILY SIGNATURE domain identified by eMATRIX, accession number PR00836C, p-value=6.211e-14, raw score of 11.95
  DOMAIN (9)..(197): Somatotropin hormone family domain identified by PFam, accession name hormone, E-value=8.2e-76, PFam score of 205.4
MAAGSRTSLLLAFALLCLPWLQEAGAVQTVPLSRLFKEAMLQAHRAHQLAIDTYQEFISSWGMDSIPTSSNMEETQQKSNLELLHISLLLIESRLEPVRFLRSTFTNNLVYDTSDSDDYHLLKDLEEGIQMLMGRLEDGSHLTGQTLKQTYSKFDTNSHNHDALLKNYGLLHCFRKDMDKVETFLRMVQCRSVEGSCGF

SEQ ID NO: 14191 - protein, 182 aa, Homo sapiens
  DOMAIN (5)..(19): SOMATOTROPIN HORMONE FAMILY SIGNATURE domain identified by eMATRIX, accession number PR00836A, p-value=2.862e-11, raw score of 14.40
  DOMAIN (2)..(77): Somatotropin hormone family domain identified by PFam, accession name hormone, E-value=1.6e-25, PFam score of 69.8
QTSFCFSDSIPTSSNMEETQQKSNLELLHISLLLIESRLEPVRFLRSTFTNNLVYDTSDSDDYHLLKDLEEGIQMLMGVRVAPGVPNPGSPLASRAGGEKHCCPLFSSQALTQENSPYSSFPLVNPPGLSLHPEGEGGKWINERGRELGPSAGPLLLFLHFAEAGRRQPPDWADPQADLQQV

SEQ ID NO: 14192 - protein, 237 aa, Homo sapiens
  DOMAIN (121)..(140): SOMATOTROPIN HORMONE FAMILY SIGNATURE domain identified by eMATRIX, accession number PR00836B, p-value=1.000e-17, raw score of 16.59
  DOMAIN (29)..(235): Somatotropin hormone family domain identified by PFam, accession name hormone, E-value=1.5e-112, PFam score of 304.4
DPKAQLPEPLRVLWTAHLAAMATGSRTSLLLAFGLLCLPWLQEGSAFPTIPLSRPFDNAMLRAHRLHQLAFDTYQEFEEAYIPKEQKYSFLQNPQTSLCFSESIPTPSNREETQQKSNLELLRISLLLIQSWLEPVQFLRSVFANSLVYGASDSNVYDLLKDLEEGIQTLMGRLEDGSPRTGQIFKQTYSKFDTNSHNDDALLKNYGLLYCFRKDMDKVETFLRIVQCRSVEGSCGF

SEQ ID NO: 14193 - protein, 387 aa, Homo sapiens
  DOMAIN (101)..(139): Somatotropin prolactin and related hormones proteins. domain identified by eMATRIX, accession number BL00266B, p-value=7.517e- 24, raw score of 24.48
  DOMAIN (66)..(151): Somatotropin hormone family domain identified by PFam, accession name hormone, E-value=3.1e-12, PFam score of 33.9
  misc_feature (1)...(387): Xaa = X or * as defined in Table 2
WIPRPNSPNHSGSCGQAHLVAMAPGSRTSLLLAFALLCLPWASRRLGAVPKPFRISRLFDHAMLQAHRAHQLAIDTYQEFEETYIPKDQKYSFLAXPQTSFCFSDSIPTPSNRRITQQKSNLELLRISLLLTESWLEPVRFPQEYCSANNLGVLTPRTAIDYHLLKDLEGGHPTVXWNICREVCFSACFSRGIRDDIEEEDDQEAYFRYMAENPTAGVVQEEEEDNLEYDSDGNPIAPTKKIIDPLPPIDHSEVDQHGLRPEGTHLTLKERTSWVESVADTLCTILTTLVMDPKAQLPEPLRVLWTGSPSGNGSRLPDVPCSWLLPCSACPGLQGGWVPCQNRSVYPGFFDHAIAPSPSRAPAGHCTPTRSLKKPHIPKDQKYSFLA

SEQ ID NO: 14194 - protein, 99 aa, Homo sapiens
GSSQGAKPQDRGWGPRTLWTPVPFMRGPQHATCLLWQPAGRVEAFCKFHMWPQGMTSLMKAALDLTYPITSMFSGAGFNSSIFSVFKDQQIEVHPHPRK

SEQ ID NO: 14195 - protein, 386 aa, Homo sapiens
GGGARGCAHVVVLKALAECGIRVDMVGGTSIGAFVGALYSEERNYSQMRIRAKQWAEGMTSLMKAALDLTYPITSMFSGAGFNSSIFSVFKDQQIEDLWIPYFAITTDITASAMRVHTDGSLWRYVRASMSLSGYMPPLCDPKDGHLLMDGGYINNLPADVARSMGAKVVIAIDVGSRDETDLTNYGDALSGWWLLWKRWNPLATKVKVLNMAEIQTRLAYVCCVRQLEVVKSKDYWEYLRPPIDSYSTLDFGKFNEICEVGYQHGRTVFDIWGRSGVLEKMLRDQQGPSKKPASAVLTCPNASFTDLAEIVSRIEPAKPAMVDDESDYQTEYEEELLDVPRDAYADFQSTSAQQGSDLEDESSLRHRHPSLAFPKLSEGSSDQDG

SEQ ID NO: 14196 - protein, 87 aa, Homo sapiens
RLMQCVSSFSKNGALQARLEICALRDTVAVYLTPESKSSFKQALEALPQLSSGADKKLLEELLNKVKSSMHLQLNCFQAASSTMMKT

SEQ ID NO: 14197 - protein, 114 aa, Homo sapiens
  misc_feature (1)...(114): Xaa = X or * as defined in Table 2
GSQKIAPVFWSGFECDSEIRLTDLESWLYILPATQPWSLTYFYFQFSFILTFLRYDKLFFFFTLYLYLNLYFFLYVFLFIVXICIFCYIYLVFIFKCVVXFFIFFFVCFMLFFL

SEQ ID NO: 14198 - protein, 49 aa, Homo sapiens
  DOMAIN (2)..(24): Kringle domain proteins domain identified by eMATRIX, accession number BL00021C, p-value=6.774e-09, raw score of 22.21
  DOMAIN (2)..(29): Trypsin domain identified by PFam, accession name trypsin, E- value=0.027, PFam score of 10.0
ILPLPLQNATVEAGTRCQVAGWGRKWSQGRVALVTGASWGPLGAEKSAT

SEQ ID NO: 14199 - protein, 101 aa, Homo sapiens
SLAALQAYSHWLAQYCSEVHRQNTQQFVTLISTTMDAITPLISTKVQDKLLLSACHLLVSLATTVRPVFLISIPAVQKVFNRITDASALRLVDKRMSSSGP

SEQ ID NO: 14200 - protein, 108 aa, Homo sapiens
SSRPATAWGHGLLLLPPAPALPSTWKSRGVAHADQAHVAHGAELPRTAHDSATFSPFQPRRDVTLELLWHFCQASPAPIALRSLLFVRDLQRLTFLLFSHHSIVILRN

SEQ ID NO: 14201 - protein, 85 aa, Homo sapiens
YEDALVLLLTEVLNRIQFRYNQAQLEELDDETLDDDVQDKLLLSACHLLVSLATTVRPVFLISIPAVQKVFNRITDASALRLVDK

SEQ ID NO: 14202 - protein, 116 aa, Homo sapiens
AQVLVCRALSNILLLPWPNLPENEQQWPVRSINHASLISALSRDYRNLKPSAVAPQRKMPLDDRHRLNITAENDCRRLHCSLRDLSSLLQAVGRLAEYFIGDVFAARFNDALTVVE

SEQ ID NO: 14203 - protein, 792 aa, Homo sapiens
VDCRMSFSYIEKFTDFLRLFVSVHLRRIESYSQFPVVEFLTLLFKYTFHQPTHEGYFSCLDIWTLFLDYLTSKIKSRLGDKEAVLNRYEDALVLLLTEVLNRIQFRYNQAQLEELDDETLDDDQQTEWQRYLRQSLEVVAKVMELLPTHAFSTLFPVLQDNLEVYLGLQQFIVTSGSGHRLNITAENDCRRLHCSLRDLSSLLQAVGRLAEYFIGDVFAARFNDALTVVERLVKVTLYGSQIKLYNIETAVPSVLKPDLIDVHAQSLAGGCRLSAHWLAQYCSEIHRQNTQQFVTLISTTMDAITPLISTKVQDKLLLSACHLLVSLATTVRPVFLISIPAVQKVFNRITDASALRLVDKAQVLVCRALSNILLLPWPNLPENEQQWPVRSINHASLISALSRDYRNLKPSAGAPQRKMPLDDTKLIIHQTLQRLRKILWENISGESTKSSTDFAYQFGCRESVQVSLGLFPAFIHQSDVTDEMLSFFLTLFRGLRVQMGVPFTEQIIQTFLNMFTREQLAESILHEGSTGCRVVEKFLKILQVVVQEPGQVFKPFLPSIIALCMEQVYPIIAERPSPDVKAELFELLFRTLHHNWRYFFKSTVLASVQRGIAEEQMENEPQFSAIMQAFGQSFLQPDIHLFKQNLFYLETLNTKQKLYHKKIFRTAMLFQFVNVLLQVLVHKSHDLLQEEIGHRHSYNMASVDFDGFFAAFLPEFLTSCDGVDANQKSVLGRNFKMDRVRRERGRAKRRAEWARKPGTCAARRGHIEASGRGLCPPCSLAAAHEMPADLVL

SEQ ID NO: 14204 - protein, 107 aa, Homo sapiens
NSKIMELLQVVPSCVASLDDVAETDRKEYVTVKIRKKWRQSVTLRQNNLPAQSGSHAAEKGNSDWPERPGLTQTGPGHRRMLRRHTVEDAVVSQGPEAAGPLSTPQE

SEQ ID NO: 14205 - protein, 86 aa, Homo sapiens
  DOMAIN (11)..(43): Ank repeat domain identified by PFam, accession name ank, E- value=1.7e-09, PFam score of 45.0
HGASINASNNKGNTALHEAVIEKHVFVVELLLLHGASVQVLNKRQRTAVDCAEQNSKIMELLQVVPSCVASLDDVAETDRKEYVTG

SEQ ID NO: 14206 - protein, 1014 aa, Homo sapiens
  DOMAIN (398)..(411): BTB (also known as BR-C/Ttk) domain proteins domain identified by eMATRIX, accession number PF00651, p-value=9.640e-09, raw score of 15.00
  DOMAIN (47)..(113): Ank repeat domain identified by PFam, accession name ank, E- value=1.2e-09, PFam score of 45.4
MPDCTSKCRSLKHALDVLSVVTKGSENQIKAFLSSHCYNAATIKDVFGRNALHLVSSCGKKGVLDWLIQKGVDLLVKDKESGWTALHRSIFYGHIDCVWSLLKHGVSLYIQDKEGLSALDLVMKDRPTHVVFKNTGCLLDPNGEKCVTAPRQVSALHHKDIALSLVAASDGATVCVTTRGDIYLLADYQCKKMASKQLNLKKVLVSGGHMEYKVDPEHLKENGGQKICILAMDGAGRVFCWRSVNSSLKQCRWAYPRQVFISDIALNRNEILFVTQDGEGFRGRWFEEKRKSSEKKEILSNLHNSSSDVSYVSDINSVYERIRLEKLTFAHRAVSVSTDPSGCNFAILQSDPKTSLYEIPAVSSSSFFEEFGKLLREADEMDSIHDVTFQVGNRLFPAHKYILAVHSDFFQKLFLSDGNTSEFTDIYQKDEDSAGCHLFVVEKVHPDMFEYLLQFIYTDTCDFLTHGFKPRIHLNKNPEEYQGTLNSHLNKVNFHEDDNQKSAFEVYKSNQAQTVSERQKSKPKSCKKGKNIREDDPVRMLQTVAKKFDFSNLSSRLDGVRFENEKINVIAKNTGNKLKLSQKKWYNVYKEKVMLVFFLFLESQNVDFICSVLVVADQLLITRLKEICEVALTEKLTLKNAAMLLEFAAMYSAKQLKLSCLQFIGLNMAALLEARSLDVLSDGVLKDLSEFYRKMIPAMDRRVITPYQDGPDISYLEVEDGDIFLKEEINMEQNHSETMFKKAKTKAKKKPRKRSDSSGGYNLSDIIQSPSSTGLLKSGKTNSVESLPELLTSDSEGSYAGVGSPRDLQSPDFTTGFHSDKIEAKVKPYVNGTSPVYSREDLKPWEKSPILKISAPQPIPSNRIDTTSSASWVAGSFSPVSPPVVDLRTIMEIEESRQKCGATPKSHLGKTVSHGVKLSQKQRKMIALTTKENNSGMNSMETVLFTPSKAPKPVNAWASSLHSVSSKSFRDFLLEEKKSVTSHSSGDHVKKVSFKGIENSQAPKIVSFVGGERR

SEQ ID NO: 14207 - protein, 383 aa, Homo sapiens
GETMFKKAKTKAKKKPRKRSDSSGGYNLSDIIQSPSSTGLLKSGKTNSVESLPELLTSDSEGSYAGVGSPRDLQSPDFTTGFHSDKIEAKVKPYVNGTSPVYSREDLKPWEKSPILKISAPQPIPSNRIDTTSSASWVAGSFSPVSPPVVDLRTIMEIEESRQKCGATPKSHLGKTVSHGVKLSQKQRKMIALTTKENNSGMNSMETVLFTPSKAPKPVNAWASSLRSVSSKSFRDFLLEEKKSVTSLSSGDHVKKVSFKGIENSQAPKIVRCSTHGTPGPEGNHISDLPLLDSPNPWLSSSVTAPSMVAPVTFASIVEEELQQEAALIRSREKPLALIQIEEHAIQDLLVFYEAFGNPEEFVIVERTPQGPLAVPMWNKHGC

SEQ ID NO: 14208 - protein, 181 aa, Homo sapiens
  misc_feature (1)...(181): Xaa = X or * as defined in Table 2
PAPPGRVFAAWPGSEEARVLVVLKGCACRAGLFKMYPLLPMTEVCTKSSTVTWFCFAAYESLFETPFSAIGVSVLVPSWGLTLALSXVCFAAFAXLLASLFSQDPLVSPSAAMWASPACFCAEPSSAAIGVSSPSSSVFTQQSXXGSPLAGSASASAKNMARARSVAPPRNGRPGNTNADS

SEQ ID NO: 14209 - protein, 845 aa, Homo sapiens
  DOMAIN (771)..(796): Bromodomain proteins domain identified by eMATRIX, accession number BL00633B, p-value=6.516e-16, raw score of 13.82
  DOMAIN (748)..(836): Bromo domain identified by PFam, accession name bromodomain, E-value=1.9e-35, PFam score of 126.8
HSAPPAVLRGGMSEAGGAGPGGCGAGAGAGAGPGALPPQPAALPPAPPQGSPCAAAAGGSGACGPATAVAAAGTAEGPGGGGSARIAVKKAQLRSAPRAKKLEKLGVYSACKAEESCKCNGWKNPNPSPTPPRADLQQIIVSLTESCRSCSHALAAHVSHLENVSEEEMNRLLGIVLDVEYLFTCVHKEEDADTKQVYFYLFKLLRKSILQRGKPVVEGSLEKKPPFEKPSIEQGVNNFVQYKFSHLPAKERQTIVELAKMFLNRINYWHLEAPSQRRLRSPNDDISGYKENYTRWLCYCNVPQFCDSLPRYETTQVFGRTLLRSVFTVMRRQLLEQARQEKDKLPLEKRTLILTHFPKFLSMLEEEVYSQNSPIWDQDFLSASSRTSQLGIQTVINPPPVAGTISYNSTSSSLEQPNAGSSSPACKASSGLEANPGEKRKMTDSHVLEEAKKPRVMGDIPMELINEVMSTITDPAAMLGPETNFLSAHSARDEAARLEERRGVIEFHVVGNSLNQKPNKKILMWLVGLQNVFSHQLPRMPKEYITRLVFDPKHKTLALIKDGRVIGGICFRMFPSQGFTEIVFCAVTSNEQVKGYGTHLMNHLKEYHIKHDILNFLTYADEYAIGYFKKQGYCKEIKIPITKYGGYIKDYEGATLMGCELNPRIPYTEFSVIIKKAEEGIIKKLIERKQAQIPKKFTLGLSCFKDGVRQIPIESIPGIKKAGWNPSGKEKSKEPRDPDQLYSTLKSILQQVKSHQSAWAFMEPVKRTEAPGYYEVIRFPMDLKTMSERLKNRYYVSKKLFMADLQRVFTNCKEYNAAESEYYKCANILEKFFFSKIKEAGLIDK

SEQ ID NO: 14210 - protein, 61 aa, Homo sapiens
  DOMAIN (14)..(54): Bromo domain identified by PFam, accession name bromodomain, E-value=1.7e-09, PFam score of 37.6
GKEKSKEPRDPDQLYSTLKSILQQVKSHQSAWPFMEPVKRTEAPGYYEVIRFPMGNTINIF

SEQ ID NO: 14211 - protein, 89 aa, Homo sapiens
  DOMAIN (23)..(37): THROMBIN RECEPTOR SIGNATURE domain identified by eMATRIX, accession number PR00908E, p-value=6.786e-09, raw score of 3.45
FWHEYTKAFFFFFSMCFLLFGSLCIYYFSLFLVFFFFLFLFCLVFCSCLHCFRYFFTPLDSPRAGSRWSSYAQLLPPPPPPLVEHSCDC

SEQ ID NO: 14212 - protein, 533 aa, Homo sapiens
  DOMAIN (467)..(500): ESICULAR LUMEN DOMAIN domain identified by eMATRIX, accession number DM01292C, p-value=4.672e-09, raw score of 12.45
  DOMAIN (44)..(100): PHD-finger domain identified by PFam, accession name PHD, E- value=4.7e-05, PFam score of 29.9
WEPAQFPPEQQWAGWGHSRCQQLGTPWQGRWGLRAEPPPGLVYPCGACRSEVNDDQDAILCEASCQKWFHRECTGMTESAYGLLTTEASAVWACDLCLKTKEIQSVYIREGMGQLVAANDGPSVAHYTPCVLQLSAPLFPCLPGLIEGKLEKAQSPIPHFLHDKRIQSLPVETLGPASRMDPESERALQAPHSPSKTDGKELAGTMDGEGTLFQTESPQSGSILTEETEVKGTLEGDVCGVEPPGPGDTVVQGDLQETTVVTGLGPDTQDLEGQSPPQSLPSNPKAVNYAKGAGKGRVRAGAAATAAAPDSRRPRAGAAKGVGQGLFQLLVNPMNIYEEQKIMFLYSLVPSTQDPLFPGYGPQCPVDLAGPPCLRPLFGGLGGYWRALQRGREGRTMTSRASELSPGRSVTAGIIIVGDEILKAPCMKSNNALIVILGTVTLDAVGIGLVMPVLPGLLRDIVHSDSIASHYGVLLALYALMQFLCAPVLGALSDRFGRRPVLLASLLGATIDYAIMATTPVLWIYPLVNSPSC

SEQ ID NO: 14213 - protein, 51 aa, Homo sapiens
RECTGMTESAYGLLTTEASAVWACDLCLKTKEIQSVYIREGMGQLVAANDG

SEQ ID NO: 14214 - protein, 66 aa, Homo sapiens
IDNYGTKPGNIFLCVFLTLGAALTAFIKADLRRQKANKETLENKLQEEEEESNTSKVPTAVSEDHL

SEQ ID NO: 14215 - protein, 80 aa, Homo sapiens
WIKDTNLKPATIKILKDDIGNTLLDNGLGKDFMTKNPKANATKTKVAKENNAVKHWVEHTLLTYRRDRARSASLVDFSLP

SEQ ID NO: 14216 - protein, 39 aa, Homo sapiens
VPAGEARVQWHDLGSLQPPPPRFKRFSCLILPSSWDYRH

SEQ ID NO: 14217 - protein, 39 aa, Homo sapiens; identical to SEQ ID NO: 14216

SEQ ID NO: 14218 - protein, 115 aa, Homo sapiens
  misc_feature (1)...(115): Xaa = X or * as defined in Table 2
PLPPGSRTLHWMAPDEEDFRIGNXTMNAIFFFLFLFFFFFFFLRQSFALVVQAGVQWHDLSSLQPPPPRFKXFSCLSLPSGWDXRHAPPRPAIFVFLVEMGFHHVNQDGLDLLTW

SEQ ID NO: 14219 - protein, 129 aa, Homo sapiens
  DOMAIN (23)..(75): Ubiquitin domain proteins domain identified by eMATRIX, accession number BL00299, p-value=7.750e-19, raw score of 28.84
  DOMAIN (10)..(128): Ubiquitin family domain identified by PFam, accession name ubiquitin, E-value=1.7e-59, PFam score of 188.5
  misc_feature (1)...(129): Xaa = X or * as defined in Table 2
DAWVDPRFRLIFLKTLTGKTMAVDLEPNDTIANAKAXIQDKEGIPPDQQRLIFAGKQLENGRTLPDYIIHKESTLLLVLRLKGGMQIFVKTLTAXTISLQAEPSDTIHNVXEKIQDKESIPPDQHTVIL

SEQ ID NO: 14220 - protein, 30 aa, Homo sapiens
  misc_feature (1)...(30): Xaa = X or * as defined in Table 2
WRDLGSLXPPPPGFKRFSXLSLKSHPNVTS

SEQ ID NO: 14221 - protein, 54 aa, Homo sapiens
  misc_feature (1)...(54): Xaa = X or * as defined in Table 2
GIISNADFVSFFFFXDGVFALVAQAGVQWRGLGSLQPLPPGFKRFSCLSLPSTW

SEQ ID NO: 14222 - protein, 134 aa, Homo sapiens
  misc_feature (1)...(134): Xaa = X or * as defined in Table 2
TYKILDFIVNSIRHRRGTPRFPGHTEVTSMTLDFIGAGXSNLQXPASTXPGDQYXIXLLQSTXNYVLHKFQLPTWKGRSEISEQAVSAKEKTXKSTXLALVKXARTLESNWPGLXILILISLSCMIWTNDSNLF

SEQ ID NO: 14223 - protein, 85 aa, Homo sapiens
  misc_feature (1)...(85): Xaa = X or * as defined in Table 2
MWSPLTKEIFSCPTPQTCGAFKGTLKRAPXXXXXXXVKIGXXXXXXXXXXXXXXXVSPRPLSARVLAPCLGCDFFVSFNRTTVWK

SEQ ID NO: 14224 - protein, 47 aa, Homo sapiens
GFRWFSCLGLPSCWDYRHAPPHPANFCIFSDRVSPCWPGWSQTPDLE

SEQ ID NO: 14225 - protein, 558 aa, Homo sapiens
  DOMAIN (50)..(63): BTB (also known as BR-C/Ttk) domain proteins domain identified by eMATRIX, accession number PF00651, p-value=7.000e-10, raw score of 15.00
  DOMAIN (274)..(557): Kelch motif domain identified by PFam, accession name Kelch, E-value=5.1e-58, PFam score of 206.2
MALKGQEDYIYLFKDSTHPVDFLDAFRTFYLDGLFTDITLQCPSGIIFHCHRAVLAACSNYFKAMFTADMKEKFKNKIKLSGIHHDILEGLVNYAYTSQIEITKRNVQSLLEAADLLQFLSVKKACERFLVRHLDIDNCIGMHSFAEFHVCPELEKESRRILCSKFKEVWQQEEFLEISLEKFLFILSRKNLSVWKEEAIIEPVIKWTAHDVENRIECLYNLLSYINIDIDPVYLKTALGLQRSCLLTENKIRSLIYNALNPMHKEISQRSTATMYIIGGYYWHPLSEVHIWDPLTNVWIQGAEIPDYTRESYGVTCLGPNIYVTGGYRTDNIEALDTVWIYNSESDEWTEGLPMLNARYYHCAVTLGGCVYALGGYRKGAPAEEAEFYDPLKEKWIPIANMIKGVGNATACVLHDVIYVIGGHCGYRGSCTYDKVQSYNSDINEWSLITSSPHPEYGLCSVPFENKLYLVGGQTTITECYDPEQNEWREIAPMMERRMECGAVIMNGCIYVTGGYSYSKGTYLQSIEKYDPDLNKWEIVGNLPSAMRSHGCVCVYNV

SEQ ID NO: 14226 - protein, 53 aa, Homo sapiens
YILLVFLTLWLLIEMIYCYRKVSKAEEAAQENASDYLAIPSENKENSAVPVEE

SEQ ID NO: 14227 - protein, 227 aa, Homo sapiens
RLKRKSKKATKQSLQDSFLLDLKSPPSFPVEISDRLPAASWEGQESCWNKQTSKSEGTQPEGTYGEQLVPELCNQSESSGEDFFLKSKLQEQDVWRRSTSFYTHMCNPWGLLVGAGGSLLIMFVIQWVYTLVNMGVAAIVYFYIGRASPGLHLGSASNFSFFRWMRSLLLPSCRSLRSPQEQIILAPSLAKVDMEMTQLTQENADFATRDRYHHSSLVNREQLMPHY

SEQ ID NO: 14228 - protein, 77 aa, Homo sapiens
PGGSQGVPAGGRGSGRWSSALPGPLPRPGSVGSPTLLATWLPAGPGRGPARGTVRKTPIPPPRCWVPGPPWFLSQTG

SEQ ID NO: 14229 - protein, 71 aa, Homo sapiens
RNTDNAWIETAGGTVHLQDQNDGELNRLNSNLHTCEWRASIPWQGGDRRIPLYANHKTLLHMAAAEIGANY

SEQ ID NO: 14230 - protein, 51 aa, Homo sapiens
MNIQYIQHESVYQNVRPSQRESTGRWSHCCPSQGRSRRIPFTVEEIQQHGV

SEQ ID NO: 14231 - protein, 85 aa, Homo sapiens
RRSFALVAQAGAQWRNLSSPQPPPLGFEQFSCLSLSSSWDYRHVPPRPANFVFLVEMGFLYVVQAGNPPALASQSAEITGTSHHA

SEQ ID NO: 14232 - protein, 91 aa, Homo sapiens
  misc_feature (1)...(91): Xaa = X or * as defined in Table 2
GSGWDGRGQSGRVADSSXARVLSALREVNKRLQDLRSCLSPKPPQGQEQQGQEDEVVLVEGPTLPETPRLFPLKIRCRADLVRLPLRMVSA

SEQ ID NO: 14233 - protein, 248 aa, Homo sapiens
  DOMAIN (193)..(245): Ubiquitin domain proteins domain identified by eMATRIX, accession number BL00299, p-value=3.620e-10, raw score of 28.84
FLGFVGPVSLHCLRPAVSCFYRDLDNSPLSPPSPRTKSRTHTRALKKLSEVNKRLQDLRSCLSPKPPQGQEQQGQEDEVVLEEGPTLPETPRLFPLKIRCRADLVRLPLRMSEPLQSVVDHMATHLGVSPSRILLLFGETELSPTATPRTLKLGVADIIDCVVLTSSPEATETSQQLQLRVQGKEKHQTLEVSLSRDSPLKTLMSHYEEAMGLSGRKLSFFFDGTKLSGRELPADLGMESGDLIEVWG

SEQ ID NO: 14234 - protein, 161 aa, Homo sapiens
  DOMAIN (25)..(41): 6 kw INDUCING XPMC2 MUSHROOM SPAC22G704. domain identified by eMATRIX, accession number DM01417D, p-value=3.618e-11, raw score of 11.08
MEPTQMPINQQMDKETILKLLKGKVVVGHALHNDFQALKYVHPRSQTRDTTYVPNFLSEPGLHTRARVSLKDLALQLLHKKIQVGQHGHSSVEDATTAMELYRLVEVQWEQQEARSLWTCPEDREPDSSTDMEQYMEDQYWPDDLAHGSRGGAREAQDRRN

SEQ ID NO: 14235 - protein, 586 aa, Homo sapiens
  DOMAIN (322)..(337): POLLEN ALLERGEN POA PI SIGNATURE domain identified by eMATRIX, accession number PR00833H, p-value=8.500e-10, raw score of 2.30
MDFQLKKKQVYVDKVEKMQQALVQLQAACEKREQLEHRLRTRLERELESLRIQQRQGNCQPTNVSEYNAAALMELLREKEERILALEADMTKWEQKYLEENVMRHFALDAAATVAAQRSIFEGHILYVHNLIVRERSHFIWDTTVISHSPNTSYDTALEARIQKEEEEILMANKRCLDMEGRIKTLHAQIIEKDAMIKVLQQRSRKEPSKTEQLSCMRPAKSLMSISNAGSGLLSHSSTLTGSPIMEEKRDDKSWKGSLGILLGGDYRAEYVPSTPSPVPPSTPLLSAHSKTGSRDCSTQTERGTESNKTAAVAPISVPAPVAAAATAAAITATAATITTTMVAAAPVAVAAAAAPAAAAAPSPATAAATAAAVSPAAAGQIPAAASVASAAAVAPSAAAAAAVQVAPAAPAPVPAPALVPVPAPAAAQASAPAQTQAPTSAPAVAPTPAPTPTPAVAQAEVPASPATGPGPHRLSIPSLTCNPDKTGNEREYADFYSHFDIANDLVYICSLLYLQSPEECLMQTMFLRPETQMRDPARSLLFQTRAQKLVTQLRQCDGKRAVIKNTHTPEPECLELYLLYHLQAV

SEQ ID NO: 14236 - protein, 473 aa, Homo sapiens
  DOMAIN (276)..(291): POLLEN ALLERGEN POA PI SIGNATURE domain identified by eMATRIX, accession number PR00833H, p-value=8.500e-10, raw score of 2.30
QLQAACEKREQLEHRLRTRLERELESLRIQQRQGNCQPTNVSEYNAAALMELLREKEERILALEADMTKWEQKYLEENVMRHFALDAAATVAAQRDTTVISHSPNTSYDTALEARIQKEEEEILMANKRCLDMEGRIKTLHAQIIEKDAMIKVLQQRSRKEPSKTEQLSCMRPAKSLMSISNAGSGLLSHSSTLTGSPIMEEKRDDKSWKGSLGILLGGDYRAEYVPSTPSPVPPSTPLLSAHSKTGSRDCSTQTERGTESNKTAAVAPISVPAPVAAAATAAAITATAATITTTMVAAAPVAVAAAAAPAAAAAPSPATAAATAAAVSPAAAGQIPAAASVASAAAVAPSAAAAAAVQVAPAAPAPVPAPALVPVPAPAAAQASAPAQTQAPTSAPAVAPTPAPTPTPAVAQAEVPASPATGPGPHRLSIPSLTCNPDKTDGPVFHSNTLERKTPIQILGQEPDAEMVEYLI

SEQ ID NO: 14237 - protein, 140 aa, Homo sapiens
  misc_feature (1)...(140): Xaa = X or * as defined in Table 2
QLWPNXLLSRNKEATLRYSQLPTCHSICYXMPAFXHTISDLSFNKNINCKSYHLRVFYKYVXIVCHFXVPKVYWTKYYQTSCRTXWRXSGVEXPPIISSSSSACCLLRRLPTEGTCPEIFWNPRLGISAECRDSCGPTSF

SEQ ID NO: 14238 - protein, 982 aa, Homo sapiens
  DOMAIN (314)..(342): PRECURSOR GLYCOPROTEIN SIGNAL RE domain identified by eMATRIX, accession number PD01719A, p-value=2.603e-11, raw score of 12.89
  DOMAIN (579)..(682): ZU5 domain identified by PFam, accession name ZU5, E-value= 3.1e-56, PFam score of 200.3
CLWRKWSVALGCRYFFGLLRGARIQLLPSGAFSCLRVSLSPSPPPGTPLSTMRKGLRATAARCGLGLGYLLQMLVLPALALLSASGTGSAAQDDDFFHELPETFPSDPPEPLPHFLIEPEEAYIVKNKPVNLYCKASPATQIYFKCNSEWVHQKDHIVDERVDETSGLIVREVSIEISRQQVEELFGPEDYWCQCVAWSSAGTTKSRKAYVRIAYLRKTFEQEPLGKEVSLEQEVLLQCRPPEGIPVAEVEWLKNEDIIDPVEDRNFYITIDHNLIIKQARLSDTANYTCVAKNIVAKRKSTTATVIVYVNGGWSTWTEWSVCNSRCGRGYQKRTRTCTNPAPLNGGAFCEGQSVQKIACTTLCPVDGRWTPWSKWSTCGTECTHWRRRECTAPAPKNGGKDCDGLVLQSKNCTDGLCMQTAPDSDDVALYVGIVIAVIVCLAISVVVALFVYRKNHRDFESDIIDSSALNGGFQPVNIKAARQDLLAVPPDLTSAAAMYRGPVYALHDVSDKIPMTNSPILDPLPNLKIKVYNTSGAVSPQDDLSEFTSKLSPQMTQSLLENEALSLKNQSLARQTDPSCTAFGSFNSLGGHLIVPNSGVSLLIPAGAIPQGRVYEMYVTVHRKETMRPPMDDSQTLLTPVVSCGPPGALLTRPVVLTMHHCADPNTEDWKILLKNQAAQGQWEDVVVVGEENFTTPCYIKLDAEACHILTENLSTYALVGHSTTKAAAKRLKLAIFGPLCCSSLEYSIRVYCLDDTQDALKEILHLERQTGGQLLEEPKALHFKGSTHNLRLSIHDIAHSLWKSKLLAKYQEIPFYHVWSGSQRNLHCTFTLERFSLNTVELVCKLCVRQVEGEGQIFQLNCTVSEEPTGIDLPLLDPANTITTVTGPSAFSIPLPIRQKLCSSLDAPQTRGHDWRMLAHKLNLDRYLNYFATKSSPTGVILDLWEAQNFPDGNLSMLAAVLEEMGRHETVVSLAAEGQY

SEQ ID NO: 14239 - protein, 205 aa, Homo sapiens
MREVEEDSPHESPLVLVSDWDVGIVTLWPCLLGSFLHHVTTRGYRRLSFVLEKAAAFQDVVVVGEENFTTPCYIQLDAEACHILTENLSTYALVGHSTTKAAAKRLKLAIFGPLCCSSLEYSIRVYCLDDTQDALKKLVGPQLSRHSAEIPNLGFQKISGQVPSVGKRLSRQQADEELLIIGGLAVPSTLAEYLLVCPADAPQPC

SEQ ID NO: 14240 - protein, 637 aa, Homo sapiens
  DOMAIN (529)..(542): GLIADIN domain identified by eMATRIX, accession number DM00406, p-value=1.800e-09, raw score of 7.73
EPSIGEFNEQVLRLMHSLGIDQQKTIESLQNKSYNHFAAIYFLLVERLKSHRSSFPVEQRLDGRQRRPSTIAEQTVAKAQTVGLPVTMHSPNMRLLRSALLPQASNVEAFSFPASGCQAEAAFMEEECVDTPKVNGCLLDPVPPVLVRKGCQSLPSNMMETSIDEGLETEGEAEEDPAHAFEAFQSTRSGQRRHTLSEVTNQLVVMPGAGKIFSMNDSPSLDSVDSEYDMGSVQRDLNFLEDNPSLKDIMLANQPSPRMTSPFISLRPTNPAMQALSSQKREVHNRSPVSFREGRRASDTSLTQGIVAFRQHLQNLARTKGILELNKVQLLYEQIGPEADPNLAPAAPQLQDLASSCPQEEVSQQQESVSTLPASVHPQLSPRQSLETQYLQHRLQKPSLLSKAQNTCQLYCKEPPRSLEQQLQEHRLQQKRLFLQKQSQLQAYFNQMQIAESSYPQPSQQLPLPRQETPPPSQQAPPFSLTQPLSPVLEPSSEQMQYSPFLSQYQEMQLQPLPSTSGPRAAPPLPTQLQQQQPPPPPPPPPPRQPGAAPAPLQFSYQTCELPSAASPAPDYPTPCQYPVDGAQQSDLTGPDCPRSPGLQEAPSSYDPLALSELPGLFDCEMLDAVDPQHNGYVLVN

SEQ ID NO: 14241 - protein, 40 aa, Homo sapiens
  DOMAIN (5)..(33): Elongation factor Tu family domain identified by PFam, accession name GTP_EFTU, E-value=0.00086, PFam score of 15.4
  misc_feature (1)...(40): Xaa = X or * as defined in Table 2
EAPXHPDFIKNMITGTSXADCAGLIVAAGGGVFKSWDLQK

SEQ ID NO: 14242 - protein, 60 aa, Homo sapiens
EFPGDPSPASSRRYPGGLGDIGRLPPAPPPRPQPLVTAKPPFLLPKSRRRKLQCQLEGCS

SEQ ID NO: 14243 - protein, 152 aa, Homo sapiens
KVTLGSTACGRWNSKMAPQGLPLPPAVNMPCINIISGTGTQRDFIYLFYFYFLRWSFTLVAQAGVQWRDLASLQPPPPGFKQFSCLSLSNCWDYRNAPPRPANFVEMGFLHVGQAGLKLLTSGDPPTSALQNAGITGMSHHAQPCLGLYFIS

SEQ ID NO: 14244 - protein, 403 aa, Homo sapiens
  DOMAIN (146)..(171): MYELIN P0 PROTEIN SIGNATURE domain identified by eMATRIX, accession number PR00213E, p-value=5.163e-12, raw score of 5.51
  DOMAIN (65)..(125): Immunoglobulin domain identified by PFam, accession name ig, E-value=4.3e-08, PFam score of 31.1
NHITKGTSHGWDEDTSPCKVYHAGSTTSPPSTACNRLAGKCSCSWAREGGAGDKSEAQSGQTSVGGSTALRCSSSEGAPKPVYNWVRLGTFPTPSPGSMVQDEVSGQLILTNLSLTSSGTYRCVATNQMGSASCELTLSVTEPSQGRVAGALIGVLLGVLLLSVAAFCLVRFQKERGKKPKETYGGSDLRCEAKEERKRDIMQNIVQILESVQLKWELFQSWTDFSRLHLSNKLAIFGIGYNTRWKEDIRYHYAEISSQVPLGKRLREYFNSEKPEGRIIMTRVQKMNWKNVYYKFLEITISEARCLELHMEIDWIPIAHSKPTGGNVVQYLLPGGIPKSPGLYAIGYEECIERPLSPHMDSKFPGTQGKEGRVDLGNPFSTSLIYRWEIGTHPNYLLLPRDC

SEQ ID NO: 14245 - protein, 85 aa, Homo sapiens
HCAPVSSLPLSLSCVHTRTRTHTHRYAHIYMQVRAHTHIWFPCSLLRQQKGVPSSPSSFTSQGALGPQVPKTQPQAWHALAFPGF

SEQ ID NO: 14246 - protein, 80 aa, Homo sapiens
  misc_feature (1)...(80): Xaa = X or * as defined in Table 2
GAVGRPRSQQKSIGVPGWVSPGFXECGKRRMTFVLLKHIMLLFPARFQQIMRNIPRRLAEHMQQPLFSSCPSLMRAFEVT

SEQ ID NO: 14247 - protein, 60 aa, Homo sapiens
FCSEPRSCHCTPAWATRAKLCLKNKNKQTKNALKEEKGDNNIATTSKVLPGPSPNPTALS

SEQ ID NO: 14248 - protein, 50 aa, Homo sapiens
LQVSSTYSRADPRVRQVALGDPLLPGASLPIAQPTGLLQAVATGSSRKGK

SEQ ID NO: 14249 - protein, 73 aa, Homo sapiens
WECPSVFTTMIPCTSLLASAVAFSVSSNLCPGWSAVVQSRLTVALTSWAQAISPLQPFPTDPVAPRSEHLASP

SEQ ID NO: 14250 - protein, 46 aa, Homo sapiens
  DOMAIN (1)..(37): Thioredoxin domain identified by PFam, accession name thiored, E-value=3e-10, PFam score of 38.4
FPTIYFAPSGDKKNPVKFEGGDRDLEHLSKFIEEHATKLSRTKEEL

SEQ ID NO: 14251 - protein, 664 aa, Homo sapiens
  DOMAIN (213)..(226): Thioredoxin family proteins domain identified by eMATRIX, accession number BL00194, p-value=6.727e-17, raw score of 12.16
  DOMAIN (76)..(634): Thioredoxin domain identified by PFam, accession name thiored, E-value=2.4e-123, PFam score of 413.1
PAAADARRPRSAPATMRPRKAFLLLLLLGLVQLLAVAGAEGPDEDSSNRENAIEDEEEEEEEDDDEEEDDLEVKEENGVLVLNDANFDNFVADKDTVLLEFYAPWCGHCKQFAPEYEKIANILKDKDPPIPVAKIDATSASVLASRFDVSGYPTIKILKKGQAVDYEGSRTQEEIVAKVREVSQPDWTPPPEVTLVLTKENFDEVVNDADIILVEFYAPWCGHCKKLAPEYEKAAKELSKRSPPIPLAKVDATAETDLAKRFDVSGYPTLKIFRKGRPYDYNGPREKYGIVDYMIEQSGPPSKEILTLKQVQEFLKDGDDVIIIGVFKGESDPAYQQYQDAANNLREDYKFHHTFSTEIAKFLKVSQGQLVVMQPEKFQSKYEPRSHMMDVQGSTQDSAIKDFVLKYALPLVGHRKVSNDAKRYTRRPLVVVYYSVDFSFDYRAATQFWRSKVLEVAKDFPEYTFAIADEEDYAGEVKDLGLSESGEDVNAAILDESGKKFAMEPEEFDSDTLRELVTAFKKGKLKPVIKSQPVPKNNKGPVKVVVGRTFDSIVMDPKKDVLIEFYAPWCGHCKQLEPVYNSLAKKYKGQKGLVIAKMEAPANDVPQRPAIRVEGFPTIYFRPPVGDKKDPSVKFEGGDRDLEPFEPSFIEEHATKLSRTKEEL

SEQ ID NO: 14252 - protein, 53 aa, Homo sapiens
  DOMAIN (14)..(42): !!!! PROTEIN ALU SUBFAMILY WARNING ENTRY NUCLEAR PHOSPHO domain identified by eMATRIX, accession number PD02454B, p-value= 3.250e-27, raw score of 11.61
  misc_feature (1)...(53): Xaa = X or * as defined in Table 2
SQNFWRPMWADHLRLGVRDQHGQHGETPSLLKIQKLAGHGGGRLXSQLVRKLR

SEQ ID NO: 14253 - protein, 26 aa, Homo sapiens
ASQFPIEWRPVKDAATVDSEPALPQQ

SEQ ID NO: 14254 - protein, 205 aa, Homo sapiens
PSLKGQKLELHRGAAALELVDPPGCRSGLVHARGCTYSQLWSRSHPFCCSRGPLAMAGILFEDIFDVKDIDRKAKKFDRVSRLHCESESFKMDLILDVTIQIYPVDLGDKFRLVIASTLYEDGTLDDGEYNPTDDRPSRADQFEYVMYGKVYRIEGDETSTEAATRLSAYVSYGGLLMRLQGDANNLHGFEVDSRVYLLMKKLAF

SEQ ID NO: 14255 - protein, 91 aa, Homo sapiens
  DOMAIN (25)..(40): WILM'S TUMOUR PROTEIN SIGNATURE domain identified by eMATRIX, accession number PR00049D, p-value=9.714e-10, raw score of 0.00
AAAARAGTPGRVGCAAQEVPLSPHNRPGLQPLPPPPPPPPYSGSGPGLRRATLTSFIPTVKAQPWLPDPPVVSNSVSPVKGQRSLGSRRHH

SEQ ID NO: 14256 - protein, 32 aa, Homo sapiens
PRDLCSRVYLLTFSPLLSYDPDTDPSPRNTPE

SEQ ID NO: 14257 - protein, 84 aa, Homo sapiens
  misc_feature (1)...(84): Xaa = X or * as defined in Table 2
MGPSPAFYKLXXXXXXXXXXXXXXXXXXXXXXXXXXXXXXXXXXXXXXXXXXXXXXXXXXXXXXSPNRFSLGCLGSFFRIPPDW

SEQ ID NO: 14258 - protein, 426 aa, Homo sapiens
  DOMAIN (110)..(151): kw TRANSCRIPTASE REVERSE II ORF2 domain identified by eMATRIX, accession number DM01354I, p-value=1.000e-40, raw score of 15.55
MGDFNTPLSTLDRSTRQKVNKDTQELNSAQHQVDLIDIYRTVHPKSTEYTFFSAPHHTYSKIDHILGSKALLSKCKRTEIITNYLSDHSAIKLELRIKNPTQSCSTTWKLNNLLLNDYWVHNEMKAEIKMFFETNENKDTTYQNLWDAFKAVCRGKFIALNAHKRKQERSKTDTLTSQLKELEKQEQTHSKASRRQEITKIRAELKEIVTQKTLQKINESRSWFFERINKIDRPLARLTKKKREKNQTDAIKNDKGDITTDPTEIQTTIREYYKHLYANKLENLEEMDKFLDTYTLPRLNQEEVESLNRPITGAEIVAIINSLPTKRVQDQMDSQPNSTRENKIPRNPTYKGCEGPLQGELQTTAQGNKRGYKQMEEHSMLMGRKNQYRENGHTAQGKPPASAEVIAEEERGFGRETQDEYRGAAP

SEQ ID NO: 14259 - protein, 108 aa, Homo sapiens
KTFFFFFFFQTNSRSVAQAGVQWRDLGSLQPLPPGFQRFSCLSLLGSWDYRRRLPRPANFCIFRGFRHVGQAGLELLTPGDPPASASQSAGITGVSHRAGLFHSVFIF

SEQ ID NO: 14260 - protein, 45 aa, Homo sapiens
  misc_feature (1)...(45): Xaa = X or * as defined in Table 2
TEILSGSLGSEIFTTSESXRPGLGPSFVIFLFSSSVCLNIFFRVL

SEQ ID NO: 14261 - protein, 97 aa, Homo sapiens
MAGTPPPALLPPCSLISDCCANNQRDSVGVGPSEPGAGYNLVVRSFLSPSEKRSVRVGVTRLFQGRPSPLSLTQKGNPLTPCASQFTSTISDGRIMV

SEQ ID NO: 14262 - protein, 457 aa, Homo sapiens
  DOMAIN (148)..(167): PROTEIN TYROSINE PHOSPHATASE SIGNATURE domain identified by eMATRIX, accession number PR00700D, p-value=8.788e-11, raw score of 12.47
  DOMAIN (75)..(204): Dual specificity phosphatase, catalytic domain identified by PFam, accession name DSPc, E-value=0.018, PFam score of -15.9
MKSPFPLVSTKAEWGTWIFNPEAEESLEPRSLISDCCANNQRDSVGVGPSEPGAGYNLVVRSFLSPSEKRSVRVGVTRLSRCRPSPLSLTQKGNPLTPCASQVRQCLALLRLRHVYFYNFGWKDYGVASLTTILDMVKVMTFALQEGKVAIHCHAGLGRTGVLIACYLVFATRMTADQAIIFVRAKRPNSIQTRGQLLCEAQQSGAFSADVSGSHSPGEPVSPSFANVHKDPNPAHQQVSHCQCKTHGVGSPGSVRQNSRTPRSPLDCGSSPKAQFLVEHETQDSKDLSEAASHSALQSELSAEARRILAAKALANLNESVEKEELKRKVEMWQKELNSRDGAWERICGERDPFILCSLMWSWVEQLKEPVITKEDVDMLVDRRADAAEALFLLEKGQHQTILCVLHCIVNLQTIPVDVEEAFLAHAIKAFTKVNFDSENGPTVYNTLKKIFKHPLE

SEQ ID NO: 14263 - protein, 112 aa, Homo sapiens
  misc_feature (1)...(112): Xaa = X or * as defined in Table 2
AFQEMELKRPQEEDVAALPEGMRPHSNLYGFSWEXVICAAVVGLFAALFFLWRSFRTVRIRIHVGRERKLALMLSGLNQXKSELLGHCILAQNEYDGYELDEXFVDLRVDKE

SEQ ID NO: 14264 - protein, 91 aa, Homo sapiens
  misc_feature (1)...(91): Xaa = X or * as defined in Table 2
KNEMTLDAYIFLADMAAYQQEEQMQLPRADAIRSRLIDTFSLIEHLQGLSQAVPRHTIRELLGQQPISSLIXIXDSYPHPLHLRVENSGEV

SEQ ID NO: 14265 - protein, 43 aa, Homo sapiens
  misc_feature (1)...(43): Xaa = X or * as defined in Table 2
ETTFYNEQRGPQPHLPEVKKKYRGNXEAKTKXLRPENWKGDIL

SEQ ID NO: 14266 - protein, 351 aa, Homo sapiens
  misc_feature (1)...(351): Xaa = X or * as defined in Table 2
ALVRLDSWMGLNTTANLGGGMTEMARGVTPWICPRSSAERARSGIPAAMVPISVKISGPQLLIGPNPPGSTKRWARNSSCSSEHCRSQGAQEESCLAQHHTPSAPSQMTXTPNCXCAGAPLAAVHRGITQRCQMNEVQVAHMPTTLPXETGDHNAELSGAPAIYLPQGAQHSPVHXDQLLXFPISXTYXEPTKLQDLLRTKSPGGTPQLFCFAHALPAVPQAQVLGLLQIMSGSPQSLRAPSLQSGLQTRLLGMSLVHLHNLAQVLEDPQQLVAPPTDYQGCFLGSKLWLPTQLSNVCSAPSSAAFLEAAPGSLDPRPPGFVVPSLPGLPGGGGSVPAAALELFAPAPPPT

SEQ ID NO: 14267 - protein, 81 aa, Homo sapiens
  misc_feature (1)...(81): Xaa = X or * as defined in Table 2
IFVSSYYHVNLFFRFTXAHSSSHXTNPQDLYPYQHGNNKVKDIPGTLPENRKVGXPLKKDLQDENKQDKPSCHLQGQLQWP

SEQ ID NO: 14268 - protein, 85 aa, Homo sapiens
DVNEWHQLGEAASALLVGKRPCLSPGSLRPLSPDFTLPPPAQAPPEPGYPYAGRAQGRLPASLRPISRPARPPGFGSPRDPALAP

SEQ ID NO: 14269 - protein, 424 aa, Homo sapiens
  DOMAIN (348)..(402): ATP:guanido phosphotransferases proteins domain identified by eMATRIX, accession number BL00112C, p-value=1.000e-40, raw score of 21.77
  DOMAIN (325)..(424): ATP:guanido phosphotransferase domain identified by PFam, accession name ATP-gua_Ptrans, E-value=3.5e-67, PFam score of 236.6
LLLNCPLFCYGLTSVLHVTCFFSHHGYYDTSKDNGAKQQPKDEIDAAEDATDFRHLPDVLKQCIPMIQASQPADSAVPATSGKVYGTPETELTYPTNIEAAPLAEEEHASSATSITECDKLSSFATSVAEDQSVASLTAPQTEETGKSSLLLDTVTSIPSSRTEATQGLDYVPSAEDKGFKSPPCEDFSVTGESEKRGEIIGKGLSGERAVEEEEEETAHVEMSEKLCSQYGTPVFSAPGHALHPGEPALGEAEERRLSPDDSTVKMASPAPSGPPSGTHTPFHESPVEEKSEPQDFQEADSWGDTQRTTSVGKRKAAEELRCLVRTGRSIRGLSLPPACTRAERREVERVVVDALSGLKGDLAGRYYRLSEMTEAEQQQLIDDHFLFDKPVSPLLTAAGMARDWPDARGIWHNNEKSFLIWVN

SEQ ID NO: 14270 - protein, 159 aa, Homo sapiens
YFLAETGFHHAGQAGLELPNSGDLSASVSQSAGITGVSHRARPRHLYFFNFNEQILFYLNVYIFNSLFPTIPFIIFCWAQGYWKPIHCFTCLPSSSVPALQTLVTSYVPLGYTEAFLATQNIGRVSLWAKHGHPDPFPLARADFRAQESPSPNDPSWLL

SEQ ID NO: 14271 - protein, 681 aa, Homo sapiens; identical to SEQ ID NO: 12759
  DOMAIN (89)..(144): Ferritin iron-binding regions proteins domain identified by eMATRIX, accession number BL00540B, p-value=9.368e-29, raw score of 18.82
  DOMAIN (25)..(132): Ferritins domain identified by PFam, accession name ferritin, E-value=2.2e-40, PFam score of 138.9

SEQ ID NO: 14272 - protein, 79 aa, Homo sapiens
DYRHLPPLLANFVFLVEMGFHHIGQAGLKLPTSGDPPASASQIARITGVSHRARQVLFIFVSPDSSTRMEAWDVLCEGC

SEQ ID NO: 14273 - protein, 141 aa, Homo sapiens
  DOMAIN (88)..(110): LUTEOVIRUS GROUP 1 COAT PROTEIN SIGNATURE domain identified by eMATRIX, accession number PR00915G, p-value=6.875e-10, raw score of 15.24
SKNDPPDHPILSSLSILFFYHQGTIVKGSFLISVVRIPRIIVMYMQNALKEQHGALSRYLFRCCYCCFWGLDKYLLHLNQNAYTTTAINGTDFCTSAKDAFKILSKNSSHFTSINCFGDFIIFLRKGLRVCFTGFGRTQCF

SEQ ID NO: 14274 - protein, 104 aa, Homo sapiens
  DOMAIN (28)..(56): !!!! PROTEIN ALU SUBFAMILY WARNING ENTRY NUCLEAR PHOSPHO domain identified by eMATRIX, accession number PD02454B, p-value= 2.410e-12, raw score of 11.61
  misc_feature (1)...(104): Xaa = X or * as defined in Table 2
FYQDKRHQPGIVAAACNPFGRSRQEDLLRSXVGDQPGQHSESPSMQKIXKLAGHGGAHVXSXLLRRPRQDNPLSPGGQGCSVLXSHHCTPAWATQGDPGSKSKN

SEQ ID NO: 14275 - protein, 23 aa, Homo sapiens
  misc_feature (1)...(23): Xaa = X or * as defined in Table 2
XFRKKEQQIKQCKGTAGQALIKE

SEQ ID NO: 14276 - protein, 417 aa, Homo sapiens
  DOMAIN (218)..(240): LUTEOVIRUS GROUP 1 COAT PROTEIN SIGNATURE domain identified by eMATRIX, accession number PR00915G, p-value=6.875e-10, raw score of 15.24
MFVFETLGAAQVMEGGQVEYKPLSGIRYMWSYHLIGLIWTSEFILACQQMTIAGAVVTCYFNRSKNDPPDHPILSSLSILFFYHQGTVVKGSFLISVVRIPRIIVMYMQNALKEQRQSWEIPGVCEEERGRKGEGLNESVYQHGALSRYLFRCCYCCFWCLDKYLLHLNQVRLYLLPQEHTEGSKGGGGGSQSPAPAGERTMHCLGAEYLNAYTTTAINGTDFCTSAKDAFKILSKNSSHFTSINCFGDFIIFLGKVLVVCFTVFGGLMAFNYNRAFQVWAVPLLLVAFFAYLVAHSFLSVFETVLDALFLCFAVDLETNDGSSEKPYFMDQEFLVSKHFISNCNLHARNLESFVKLHTRKRLIPSLSLLEGSEASTTPGPESGICAELSKAEPTSLSENLLPEEVKLNKNADQMDS

SEQ ID NO: 14277 - protein, 140 aa, Homo sapiens
  DOMAIN (2)..(24): LUTEOVIRUS GROUP 1 COAT PROTEIN SIGNATURE domain identified by eMATRIX, accession number PR00915G, p-value=6.875e-10, raw score of 15.24
AINGTDFCTSAKDAFKILSKNSSHFTSINCFGDFIIFLGKVLVVCFTVFGGLMAFNYNRAFQVWAVPLLLVAFFAYLVAHSFLSVFETVLDALFLCFAVDLETNDGSSEKPYFMDQEFLSFVKRSNKLNNARATAGTSTH

SEQ ID NO: 14278 - protein, 83 aa, Homo sapiens
  misc_feature (1)...(83): Xaa = X or * as defined in Table 2
MSAHSHPCTCINGHTPVSITYXXXXXGGPFKRTLGGPKFNGGGQGKIFFFMGGLFKPSLGFLEKNLFXXXXTYGATPPPKFKP

SEQ ID NO: 14279 - protein, 108 aa, Homo sapiens
  misc_feature (1)...(108): Xaa = X or * as defined in Table 2
ALKFCRGVFPIFSPPQKKFLFQNSPGGFFFPPLKEKNFSFPPXKSSSPPKPLNFVGGFFPFFPPPNKKFLFQNSPGGFFFPPLKEKNFSFPPPVKFGPPQGSFXTPPP

SEQ ID NO: 14280 - protein, 40 aa, Homo sapiens
  misc_feature (1)...(40): Xaa = X or * as defined in Table 2
MGGQLKPSLGFLEKNLFFGGEKNGHXXXXKFKPLGXXXXF

SEQ ID NO: 14281 - protein, 17 aa, Homo sapiens
MKVICGVILPKQGGNSA

SEQ ID NO: 14282 - protein, 362 aa, Homo sapiens
  DOMAIN (1)..(336): Glycosyl hydrolases family 18 domain identified by PFam, accession name Glyco_hydro_18, E-value=9.3e-184, PFam score of 619.2
YKLVCYYTSWSQYREGDGSCFPDALDRFLCTHIIYSFANISNDHIDTWEWNDVTLYGMLNTLNNTNPNLKTLLSVGGWNFGSQRFSKIASNTQSRRTFIKSVPPFLRTHGFDGRDLAWLYPGRRDKHHFTTLIKEMKAEFIKEAQPGKKQLLLSAALSAGKVTIDSSYDIAKISQHLDFISIMTYDFHGAWRGTTGHHSPLFRGQEDASPDRFSNTDYAVGYMLRLGAPASKLVMGIPTFGRSFTLASSETGVPAPISGPGIPGRFTKEAGTLAYYEICDFLRGATVHRTLGQQVPYATKGNQWVGYDDQESVKSKVQYLKDRQLAGAMVWALDLDDFQGSFCGQDLRFPLTNAIKDALAAT

SEQ ID NO: 14283 - protein, 404 aa, Homo sapiens
  DOMAIN (153)..(165): Chitinases family 18 proteins domain identified by eMATRIX, accession number BL01095B, p-value=2.469e-09, raw score of 10.82
  DOMAIN (43)..(379): Glycosyl hydrolases family 18 domain identified by PFam, accession name Glyco_hydro_18, E-value=3.1e-187, PFam score of 630.9
LAPGAVGKGRGHTLPCSAAARMGVKASQTGFVVLVLLQCCSAYKLVCYYTSWSQYREGDGSCFPDALDRFLCTHIIYSFANISNDHIDTWEWNDVTLYGMLNTLKNRNPNLKTLLSVGGWNFGSQRFSKIASNTQSRRTFIKSVPPFLRTHGFDGLDLAWLYPGRRDKQHFTTLIKEMKAEFIKEAQPGKKQLLLSAALSAGKVTIDSSYDIAKISQHLDFISIMTYDFHGAWRGTTGHHSPLFRGQEDASPDRFSNTDYAVGYMLRLGAPASKLVMGIPTFGRSFTLASSETGVGAPISGPGIPGRFTKEAGTLAYYEICDFLRGATVHRTLGQQVPYATKGNQWVGYDDQESVKSKVQYLKDRQLAGAMVWALDLDDFQGSFCGQDLRFPLTNAIKDALAAT

SEQ ID NO: 14284 - protein, 56 aa, Homo sapiens
  DOMAIN (8)..(49): Glycosyl hydrolases family 18 domain identified by PFam, accession name Glyco_hydro_18, E-value=3.4e-13, PFam score of 46.4
FPGRRFRGIPTFGRSFTLASSETGVGAPISGPGIPGRFTKEAGTLAYYEVMELGRR

SEQ ID NO: 14285 - protein, 4 aa, Homo sapiens
ILQR

SEQ ID NO: 14286 - protein, 21 aa, Homo sapiens
MCSTSRSRFTNILKSCNLLKY

SEQ ID NO: 14287 - protein, 30 aa, Homo sapiens
TPGLEQSACLSLPKCWDYRCEPLCPACYLI

SEQ ID NO: 14288 - protein, 101 aa, Homo sapiens
EVFSLLNVLCKKSTVGHKLTSLQHLLTPSAVIQSPSSLLDTSFLLFARHQHWPFAVPLDFLHSVLAVPFGCFLEVFFFSYRPCLASLCLGFIFLCIIQGES

SEQ ID NO: 14289 - protein, 36 aa, Homo sapiens
RRSLALSPKLECSGVILAHCKLCLPGSRHSPAPARD

SEQ ID NO: 14290 - protein, 97 aa, Homo sapiens
  misc_feature (1)...(97): Xaa = X or * as defined in Table 2
FLFLFFETESCSVARLECSGAISAHCKLCLPGSRHSPASASSQVAGSTGACHQAQANFVFVFLVETGFYRVSPGXSGLSLELVIRPPRPPKVLGLQV

SEQ ID NO: 14291 - protein, 82 aa, Homo sapiens
KKFSLGSQGGRAGVFPRPPLGKLQTTALNSGAKGTPPFLFPEPRKRGGPPPAPGWEGIFCPHFFPMGQKGEGGLWHTGEGPH

SEQ ID NO: 14292 - protein, 77 aa, Homo sapiens
QNFSLVQAVAQWRSLGSLQPLPPRFKQFLCLSLPGSWDYRRMPPCPANHLRLMSMWARVCTQQKVAGKAPSLLLKSP

SEQ ID NO: 14293 - protein, 93 aa, Homo sapiens
RTPRMKQSPAPIPCQPTTCSGCMASRATRTGWTSVCAYCRLFRAHACVPVALPEMVRALSAQQQTLKQIVICGDRQAKDTKALGAVRPLCLHS

SEQ ID NO: 14294 - protein, 111 aa, Homo sapiens
WGPLELPVPPAAFPEYPPTVGRPRPLHMCVRIKPCSVPITDPCELRKTTTSIDMPIPLGVGLEGEASQLDVETPRPCRAVVEPCGHPWSTLPLRLTLGQYVTCPPLGTHSP

SEQ ID NO: 14295 - protein, 66 aa, Homo sapiens
CPPSSAVSPAPGAAAGPPPGLSSAESRNTATSLPLPECPLIKPIPAALSALGPPDFHNEQGKGLRT

SEQ ID NO: 14296 - protein, 340 aa, Homo sapiens
  DOMAIN (202)..(216): TYPE II ANTIFREEZE PROTEIN SIGNATURE domain identified by eMATRIX, accession number PR00356G, p-value=8.644e-09, raw score of 10.80
  DOMAIN (1)..(230): TBC domain identified by PFam, accession name TBC, E-value= 6.1e-29, PFam score of 109.6
  misc_feature (1)...(340): Xaa = X or * as defined in Table 2
ESKHGNFFWVIFLCYCTKEERTQLQKQKTDEYFRMKLQWKSISQEQEKRNSRLRDYRSLIEKDVNRTDRTNKFYEGQDNPGLILLHDILMTYCMYDFDLGYVQGMSDFFSPFLYVMENEVDAFWCFASYMDQMHQNFEEQMQGMKTQLIQLSTLLRLLDSGFCSYLESQDSGYLYFCFRWLLIRFKREFSFLDILRLWEVMWTELPCTNFHLLLCCAILESEKQQIMEKHYGFNEILKHINELSMKIDVEDILCKAEAISLQMVKCKELPQAVCEILGLQGSAVTTPDSDVGXRTKMLVNDFLGPTVCISKVTALPTLSASGARNDSPTQIPVSSRCLQD

SEQ ID NO: 14297 - protein, 57 aa, Homo sapiens
  misc_feature (1)...(57): Xaa = X or * as defined in Table 2
TDSALGSPCLHPTALCAVCGTAXSSTGLVALALMRLELILKSSVPAVMAGIITIYNL

SEQ ID NO: 14298 - protein, 146 aa, Homo sapiens
  DOMAIN (53)..(88): Matrix protein (MA) p15. domain identified by eMATRIX, accession number PF01140D, p-value=1.360e-11, raw score of 15.54
DLEGTKMFQVRNAWAMEWDKKERRKERKKERKKERKKERKKERKKERKKERTEGRKEREKERERQRKRKKERERERERERQREGKGREGKERKGGRKEKKERKKERKKKRKETKEGKKEGKKEGRKRKRERKNSKECQSSYRLFRV

SEQ ID NO: 14299 - protein, 287 aa, Homo sapiens
EIGVNHTHLLFHTEVRWLSQGKVLSRVYELRNEIYIFLVEKQSHLANIFEDDIWVTKLAYLSDIFGILNELSLKMQGKNNDIFQYLEHILGFQKTLLLWQARLKSNRPSYYMFPTLLQHIEENIINEDCLKEIKLEILLHLTSLSQTFNYYFPEEKFESLKENIWMKDPFAFQNPESIIELNLEPEEENELLQLSSSFTLKNYYKILSLSAFWIKIKDDFPLLSRKSILLLLPFTTTYLCELGFSILTRLKTKKRNRLNSAPDMRVALSSCVPDWKELMNRQAHPSH

SEQ ID NO: 14300 - protein, 117 aa, Homo sapiens
PEMLFCATSQCQLTGGGAWLSSTARSVGTTSDGVPVPLLRVRLPRVSNTDPPPALGPVPGSPQNPHSLLLSCRLLQPARAPRAWDILCSPQEPEAEPPAQSAPPQQPSHYQGLHCGH

SEQ ID NO: 14301 - protein, 120 aa, Homo sapiens
  DOMAIN (39)..(56): Fibrinogen beta and gamma chains C-terminal domain proteins domain identified by eMATRIX, accession number BL00514E, p-value= 5.846e-12, raw score of 14.28
  DOMAIN (11)..(102): Fibrinogen beta and gamma chains, C-term domain identified by PFam, accession name fibrinogen_C, E-value=2.2e-29, PFam score of 104.2
CSGFLTFLPCQAGFGRPDGEYWLGLEPVYQLTSRGDHELLVLLEDWGGRGARAHYDGFSLEPESDHYRLRLGQYHGDAGDSLSWHNDKPFSTVDRDRDSYSGKENSYSGERIGEAGLLFW

SEQ ID NO: 14302 - protein, 575 aa, Homo sapiens
  DOMAIN (159)..(337): Glycosyl transferases domain identified by PFam, accession name Glycos_transf_2, E-value=1.9e-09, PFam score of 44.8
ARAKTNSWGCERPRPGPESTPAQSPTWGARLPTMRKIRANAIAILTVAWILGTFYYLWQDNRAHAASSGGRGAQRAGRRSEQLREDRTIPLIVTGTPSKGFDEKAYLSAKQLKAGEDPYRQHAFNQLESDKLSPDRPIRDTRHYSCPSVSYSSDLPATSVIITFHNEARSTLLRTVKSVLNRTPANLIQEIILVDDFSSDPEDCLLLTRIPKVKCLRNDRREGLIRSRVRGADVAAATVLTFLDSHCEVNTEWLPPMLQRVKEDHTRVVSPIIDVISLDNFAYLAASADLRGGFDWSLHFKWEQIPLEQKMTRTDPTRPIRTPVIAGGIFVIDKSWFNHLGKYDAQMDIWGGENFELSFRVWMCGGSLEIVPCSRVGHVFRKRHPYNFPEGNALTYIRNTKRTAEVWMDEYKQYYYEARPSAIGKAFGSVATRIEQRKKMNCKSFRWYLENVYPELTVPVKEALPGIIKQGVNCLESQGQNTAGDFLLGMGICRGSAKNPQPAQAWLFSDHLIQQQGKCLAATSTLMSSPGSPVILQMCNPREGKQVSLLASGPEAQQPEGPCLRVADLGRRAPD

SEQ ID NO: 14303 - protein, 423 aa, Homo sapiens
MRRLMKGDEVLHVVYDIIYHPKKEASKINIIHQGFGFGFVFWEVMRGVDHTRVVSPIIDVISLDNFAYLAASADLRGGFDWSLHFKWEQIPLEQKMTRTDPTRPIRTPVIAGGIFVIDKSWFNHLGKYDAQMDIWGGENFELSFRVWMCGGSLEIVPCSRVGHVFRKRHPYNFPEGNALTYIRNTKRTAEVWMDEYKQYYYEARPSAIGKAFGSTTPAKYEVLNVEETEAQIAGDEGRQPVAIVVGVPEEGQSPSPASSYSVATRIEQRKKMNCKSFRWYLENVYPELTVPVKEALPGIIKQGVNCLESQGQNTAGDFLLGMGICRGSAKNPQPAQAWLFSDHLIQQQGKCLAATSTLMSSPGSPVILQMCNPREGKQKWRRKGSFIQHSVSGLCLETKPAQLVTSKCQADAQAQQWQLLPHT

SEQ ID NO: 14304 - protein, 109 aa, Homo sapiens
  DOMAIN (53)..(71): Transient receptor domain identified by PFam, accession name Trans_recep, E-value=1e-08, PFam score of 30.5
LIKLCKSKAKSCENDLEMGMLNSKFKKTRYQAGMRNSENLTANNTLSKPTRYQGELKEIKQDISSLRYELLEEKSQATGELADLIQQLSEKFGKNLNKDHLRVNKGKDI

SEQ ID NO: 14305 - protein, 267 aa, Homo sapiens
  DOMAIN (21)..(229): Transient receptor domain identified by PFam, accession name Trans_recep, E-value=6.5e-116, PFam score of 385.5
MPIRHPSGDIKLVIGYGEERVEESFKTLFWSIFGLSEVISVVLKYDHKFIENIGYVLYGVYNVTMVVVLLNMLIAMINNSYQEIEEDADVEWKFARAKLWLSYFDEGRTLPAPFNLVPSPKSFYYLIMRIKMCLIKLCKSKAKSCENDLEMGMLNSKFKKTRYQAGMRNSENLTANNTLSKPTRYQKIMKRLIKRYVLKAQVDRENDEVNEGELKEIKQDISSLRYELLEEKSQATGELADLIQQLSEKFGKNLNKDHLRVNKGKDI

SEQ ID NO: 14306 - protein, 117 aa, Homo sapiens
AERLEAGAPTICMPGRWTFILRSEPHFCPLRPAAQEPRIGADRGPGRNEAPAPDLPGLPRLLRSGSGVLPGKGLGAKWKGMLSGRPSPCSGALGPLGPENPFPWQVLTESWPSRQLA

SEQ ID NO: 14307 - protein, 19 aa, Homo sapiens
LIKKAVAVRKHLERNRKVS

SEQ ID NO: 14308 - protein, 96 aa, Homo sapiens
  DOMAIN (19)..(60): Site-specific recombinases proteins domain identified by eMATRIX, accession number BL00397C, p-value=5.393e-09, raw score of 19.42
  misc_feature (1)...(96): Xaa = X or * as defined in Table 2
WYVKKERKKERKQERKKERKKERKKERKKRKRERKKERXREREREGRKEGRKEGRKEGRKEGRKEGRKKGRREGREKERERKKEREEISREYDSEK

SEQ ID NO: 14309 - protein, 172 aa, Homo sapiens
  DOMAIN (41)..(54): EF-hand calcium-binding domain proteins domain identified by eMATRIX, accession number BL00018, p-value=1.391e-09, raw score of 7.41
  DOMAIN (32)..(60): EF hand domain identified by PFam, accession name efhand, E- value=6.5e-09, PFam score of 43.0
MSSKRTKTKTKKRPQRATSNVFAMFDQSQIQEFKEAFNMIDQNRDGFIDKEDLHDMLASLGKNPTDEYLDAMMNEAPGPINFPQWFSPMLVRSLNAPDPENVIRNAFACFDEEAPGPIQEDYLRELLPTMGDRFTNEEVDELHREAPIDKKGNFNYIGFTRILEHGAKDKDD

SEQ ID NO: 14310 - protein, 193 aa, Homo sapiens
  DOMAIN (45)..(58): EF-hand calcium-binding domain proteins domain identified by eMATRIX, accession number BL00018, p-value=1.391e-09, raw score of 7.41
  DOMAIN (37)..(65): EF hand domain identified by PFam, accession name efhand, E- value=3.7e-08, PFam score of 40.5
TTTMSSKKAKTKTTKKRPQRATSNVFAMFDQSQIQEFKEAFNMIDQNRDGFIDKEDLHDMLASLGKNPTDAYLDAMMNEAPGPINSTMFLTMFGEKFKSHRSPEDVIRANGLCFCSDEEATGHPFQEDYTLRELLTNPWGDRFPDGGKWMNLYQRKHLIGPKKGEFSNYIGVHHGILTGRPPKHKDDLKELLA

SEQ ID NO: 14311 - protein, 36 aa, Homo sapiens
ALMAPSHSSLGNRVRPPFKLTKPGRAQWLTPVIPAL

SEQ ID NO: 14312 - protein, 30 aa, Homo sapiens
  misc_feature (1)...(30): Xaa = X or * as defined in Table 2
GGSCLXSQHFGRPRWADHEVRRSRPSWLTR

SEQ ID NO: 14313 - protein, 30 aa, Homo sapiens; identical to SEQ ID NO: 14312
  misc_feature (1)...(30): Xaa = X or * as defined in Table 2

SEQ ID NO: 14314 - protein, 30 aa, Homo sapiens; identical to SEQ ID NO: 14312
  misc_feature (1)...(30): Xaa = X or * as defined in Table 2

SEQ ID NO: 14315 - protein, 30 aa, Homo sapiens; identical to SEQ ID NO: 14312
  misc_feature (1)...(30): Xaa = X or * as defined in Table 2

SEQ ID NO: 14316 - protein, 30 aa, Homo sapiens; identical to SEQ ID NO: 14312
  misc_feature (1)...(30): Xaa = X or * as defined in Table 2

SEQ ID NO: 14317 - protein, 48 aa, Homo sapiens
  DOMAIN (13)..(48): Matrix protein (MA) p15. domain identified by eMATRIX, accession number PF01140D, p-value=9.791e-09, raw score of 15.54
  misc_feature (1)...(48): Xaa = X or * as defined in Table 2
CLLLNSIYRRHQRGRXDGKERKKDRKKERKKERKKERKKERKKERKKE

SEQ ID NO: 14318 - protein, 139 aa, Homo sapiens
  DOMAIN (86)..(122): Ribosomal protein S12 proteins domain identified by eMATRIX, accession number BL00055, p-value=2.200e-24, raw score of 15.98
  DOMAIN (3)..(139): Ribosomal protein S12 domain identified by PFam, accession name Ribosomal_S12, E-value=8.5e-64, PFam score of 225.4
RRLRTAMKLRSHRPDQTWHDQQYNKAHLGAALQANPLGGAAHAKGIVLEKVRVEATQPKSAIMKCVRVQLIKNGKKITAFVPNDGCLNFIEENDEVLVAGFGRKGHAVGDIPGVRFKVVKVANVFILALYKGKKERPRS

SEQ ID NO: 14319 - protein, 58 aa, Homo sapiens
  misc_feature (1)...(58): Xaa = X or * as defined in Table 2
SATNYRNLTVLELGNSTHRHSHKTNSTXKNCTRIPQTSQLNKXVKKHQSHICQSNCPF

SEQ ID NO: 14320 - protein, 24 aa, Homo sapiens
SQHFGRPRWADHEVWSLRPSWLTQ

SEQ ID NO: 14321 - protein, 102 aa, Homo sapiens
PPHLQDRGKPVRAPPDVRTRRNQQEGSPSSLLGRPPGPAEPCPTQLHRAVLPPHGRRAEETTRSGEQGHEGGDLSTQVFRGTLSSSGSASGGHLPPCGSRRA

SEQ ID NO: 14322 - protein, 166 aa, Homo sapiens
  misc_feature (1)...(166): Xaa = X or * as defined in Table 2
TARAWLLLGPVWPCVSERWSKKPSPRGGRDPSDRDPAAFAARSTVPPRISAYERPVPWPGEWNDPRGPGRRASAVVSPREGNWGVLRDPRLQARKPRMVRSRQMCNTNMSVPTDGCCNHLTDSSFGTRDPGXTKAIAFEVIKVCWCTKRHLYYERGSFLSWPVYYD

SEQ ID NO: 14323 - protein, 67 aa, Homo sapiens
  DOMAIN (21)..(57): Ribosomal protein S12 proteins domain identified by eMATRIX, accession number BL00055, p-value=6.029e-22, raw score of 15.98
  DOMAIN (26)..(64): Ribosomal protein S12 domain identified by PFam, accession name Ribosomal_S12, E-value=3.3e-16, PFam score of 63.1
CKGVSSHESIFVIATNTRNKLLILFQENDEVLVAGFGRKGHAVGDIPGVRFKVVKVANVSLLALLIF

SEQ ID NO: 14324 - protein, 44 aa, Homo sapiens
GQLYEKLGRRGPGAVAHAYNSQHFGRLRWADHEVRRWRPSWLTQ

SEQ ID NO: 14325 - protein, 143 aa, Homo sapiens
  DOMAIN (1)..(17): Ribosomal protein S12 domain identified by PFam, accession name Ribosomal_S12, E-value=0.064, PFam score of 11.5
  misc_feature (1)...(143): Xaa = X or * as defined in Table 2
MTGCLNFIEENDEVLVAWIWSQKVMLLVIFLESXFKVVQSSPMVSLLALYKWLYGETKIINMNGENTVVINFHMPKNVCILLSPVLTTKIMFITTTTPPYFFYPKPVNAGPVPILGNNKTGLFQDSLELITFVTWHSFPHPVE

SEQ ID NO: 14326 - protein, 31 aa, Homo sapiens
IHILTLQELLKEALNMERDKQYEPLGKHTKL

SEQ ID NO: 14327 - protein, 92 aa, Homo sapiens
LDLDKSIKIVKKLKLTGFPYKIFKNTSFIKDIVFMRTWYPVSIPAFYNPVTSLLKPVGEKDTWSGMWTTGHLGLAHGVRLKTNKDSLYKGLV

SEQ ID NO: 14328 - protein, 85 aa, Homo sapiens
  misc_feature (1)...(85): Xaa = X or * as defined in Table 2
HNSLVVYYFEIWSRILFVYSCSIHTSVVTHXSLLSLGHLKYIWAGHGVSHLXFQHFGRPRWENHLRPGLXDQPGQHSETPSLLKK

SEQ ID NO: 14329 - protein, 147 aa, Homo sapiens
  misc_feature (1)...(147): Xaa = X or * as defined in Table 2
PPRHVQLNHAEFEDQDDEARVQYEGFRPGMYVCVEIENVPCEFVXNFDPRYPIILGGLGNSEGNVGYVQIPITPQGTGFLAIQSVSGIMPDFRIAATGVVLDLDKSIKIVKKLKLTGFPYKIFKNTSFIKGMFNSALEVAKFEGAVF

SEQ ID NO: 14330 - protein, 108 aa, Homo sapiens
  misc_feature (1)...(108): Xaa = X or * as defined in Table 2
DPITPQGTGFLAIQSVSGIMPDFRIAATGVVLDLDKSIKIVKKLKLTGFPYKIFKNTSFIKGMFNSALEVAKFEGAVIRTISGIRGQIKKALXAPEGAFRASFEDKLL

SEQ ID NO: 14331 - protein, 1285 aa, Homo sapiens
  DOMAIN (88)..(109): GTP1/OBG GTP-BINDING PROTEIN FAMILY SIGNATURE domain identified by eMATRIX, accession number PR00326A, p-value=1.386e- 09, raw score of 8.75
  misc_feature (1)...(1285): Xaa = X or * as defined in Table 2
IATMEAKDQKKHRKKNSGPKAAKKKKRLLQDLQLGDEEDARKRNPKAFAVQSAVRMARSFHRTQDLKTKKHHIPVVDRTPLEPPPIVVVVMGPPKVGKSTLIQCLIRNFTRQKLTEIRGPVTIVSGKKRRLTIIECGCDINMMIDLAKVADLVLMLIDASFGFEMETFEFLNICQVHGFPKIMGVLTHLDSFKHNKQLKKTKKRLKHRFWTEVYPGAKLFYLSGMVHGEYQNQEIHNLGRFITVMKFRPLTWQTSHPYILADRMEDLTNPEDIRTNIKCDRKVSLYGYLRGAHLKNKSQIHMPGVGDFAVSDISFLPDPCALPEQQKKRCLNEKEKLVYAPLSGVGGVLYDKDAVYVDLGGSHVFQDEVGPTHELVQSLISTHSTIDAKMASSRVTLFSDSKPLGSEDIDNQGLMMPKEEKQMDLNTGRMRRKAIFGDEDESGDSDDEEDDEMSEDDGLENGSSDEEAEEEENAEMTDQYMAVKGIKRRKLELEEDSEMDLPAFADSDDDLERSSAEEGEAEEADESSEEEDCTAGEKGISGSKAAGEGSKAGLSPANCQSDRVNLEKSLLMKKAALPTFDSGHCTAEEVFASEDESEESSSLSAEEEDSENEEAIRKKLSKPSQVSSGQKLGPQNFIDETSDIENLLKEEEDYKEENNDSKETSGALKWKEDLSRKAAEAFLRQQQAAPNLRKLIYGTVTEDNEEEDDDTLEELGGLFRVNQPDRECKHKADSLDCSRFLVEAPHDWDLEEVMNSIRDCFVTGKWEDDKDAAKVLAEDEELYGDFEDLETGDVHKGKSGPNTQNEDIEKEVKEEIDPDEEESAKKKHLDKKRKLKEMFDAEYDEGESTYFDDLKGEMQKQAQLNRAEFEDQDDEARVQYEGFRPGMYVRIEIENVPCEFVQNFDPHYPIILGGLGNSEGNVGYVQMRLKKHRWYKKILKSRDPIIFSVGWRRFQTIPLYYIEDHNGRQRLLKYTPQHMHCGAAFWGPITPQGTGFLAIQSVSGIMPDFRIAATGVVLDLDKSIKIVKKLKLTGFPYKIFKNTSFIKGMFNSALXVAKFEGAVIRTVSGIRGQIKKALRAPEGVFRASFEDKLLMSDIVFMRTWYPVSIPAFFNPVTSLLKPVGEKDTWSGMRTTGQLRLAHGVRLKANKDSLYKPILRQKKHFNSLHIPKALQKALPFKNKPKTQAKAGKVPKDRRRPAVIREPHERKILALLDALSTVHSQKMKKAKEQRHLHNKEHFRAKQKEEEEKLKRQKDLRKKLFRIQGQKERRNQKSSLKGAEGQLQ

SEQ ID NO: 14332 - protein, 64 aa, Homo sapiens
PDFRIAATGVVLDLDKSIKIVKKLKLTGFPYKIFKNTSFIKVCISIYSHIYKSPYWLRKGMKYL

SEQ ID NO: 14333 - protein, 65 aa, Homo sapiens
QARLCLKKKKKKMWHIYTMEYYAAIKKNGIMSCAATWMELEAIILNELTQKQKTKYHMFSLISRS

SEQ ID NO: 14334 - protein, 152 aa, Homo sapiens
IFLRQFLSPRLEYSGVIKAHCSLNLLGSSDPPASAFKVAGTTGIRHHAWLIFVFFFAETGFHYVAQGGLELLNLRNLPATAFQSAGIIGISHHDLLGIQITTWLLQKLSYLQKKICKDQETGLLHAFHLYPYPYPMPSSPQLLQGPDILTNG

SEQ ID NO: 14335 - protein, 47 aa, Homo sapiens
VETGFHHVGGAGLELLTSDDPPASDYQSAGITGISHCARPMAPFLTL

SEQ ID NO: 14336 - protein, 46 aa, Homo sapiens
MLSFSFLSFFFFRGMVLTMLLPRVVLNCWPQAILPPRPPKVLGLLA

SEQ ID NO: 14337 - protein, 106 aa, Homo sapiens
  DOMAIN (37)..(62): APILLOMAVIRUS E4 PROTEIN domain identified by eMATRIX, accession number DM00784A, p-value=3.864e-09, raw score of 16.65
GLLMSPITLCLVDLLPLLLLLLLLLLLLLLLLLLLLLLLLLLLLLLLLLPPPPPPPPPPPPPLLLLLLLLLLFFFFFETESRSVAQAGVQWRHLGSLQALPPRFAP

SEQ ID NO: 14338 - protein, 86 aa, Homo sapiens
  DOMAIN (15)..(39): RHODOPSIN-LIKE GPCR SUPERFAMILY SIGNATURE domain identified by eMATRIX, accession number PR00237E, p-value=9.100e-10, raw score of 13.03
  misc_feature (1)...(86): Xaa = X or * as defined in Table 2
KFFSFLSSACCLEQVLFCFVLFFVFFLLLIIFSFFFSFSFSSFFFSSSSSSSSSFSSSSFFFLRWSPRSVAQAGVQWSXFGSLQPP

SEQ ID NO: 14339 - protein, 184 aa, Homo sapiens
  misc_feature (1)...(184): Xaa = X or * as defined in Table 2
DLILNHLFFCFVIRQQFSFLFFFPSFFHFFIAMLTHQSYVIFLSVYTVIIHLDFYISLFLTYDIMYFXTKINTXAKLLLIYENMLIVLXCSAFLSNYTVLIVQIIASLIHSSTKXISQCANIIKIXIILHXLXSSVEINSYLXLFCYLVYSAIILELVLQSQFSYYMYILRIIQLDFLNEEMHI

SEQ ID NO: 14340 - protein, 126 aa, Homo sapiens
ILVLHGCFICWWYLCLSMYFFFNFFEMESRSVAQAGVQWCADLCSLQAPPAGFTPFSCLSLPSSWDYRHPPPRLAKFFVFLVETGFHRVSQDGLDLLTSGDPPTSASQSAGITGVSHRARPLKHLS

SEQ ID NO: 14341 - protein, 406 aa, Homo sapiens
  DOMAIN (103)..(113): Eukaryotic  RNA-binding region RNP-1 proteins domain identified by eMATRIX, accession number BL00030B, p-value=2.200e- 10, raw score of 7.03
  DOMAIN (64)..(213): RNA recognition motif. domain identified by PFam, accession name rrm, E-value=1.3e-34, PFam score of 128.4
MGKVWKQQMYPQYATYYYPQYLQAKQSLVPAHPMAPPSPSTTSSNNNSSSSSNSGWDQLSKTNLYIRGLPPHTTDQDLVKLCQPYGKIVSTKAILDKTTNKCKGYGFVDFDSPAAAQKAVSALKASGVQAQMAKQQEQDPTNLYISNLPLSMDEQELENMLKPFGQVISTRILRDSSGTSRGVGFARMESTEKCEAVIGHFNGKFIKTPPGVSAPTEPLLCKFADGGQKKRQNPNKYIPNGRPWHREGEVRLAGMTLTYDPTTAAIQNGFYPSPYSIATNRMITQTSITPYIASPVSAYQVQSPSWMQPQPYILHDPGAVLTPSMEHTMSLQPASMISPLAQQMSHLSLGSTGTYMPATSAMQGAYLPQYAHMQTTAVPVEEASGQQQVAVETSNDHSPYTFQPNK

SEQ ID NO: 14342 - protein, 389 aa, Homo sapiens [sequence omitted]

SEQ ID NO: 14343 - protein, 247 aa, Homo sapiens
VFLVEMGFHHVGQPSLELPSSSDAPASASQTAGITGVSHCSRPVRFFFAGMLLTCCISWRCFASRALCRLQHPIISSSQQPLAFQCFWSTDVPKTRVYQIGTILPLPSKLLDSWAEGYPATFESHVPGIYSRVGVSSIWHLGCVWSEPGVSRFLPMRWDGPSAREWMVLCHARKAAPAPCSRFPAQPVLSQAPPPATVALCHVLTSLIPLFNLPQVLSYWLPSRDEVGVSAWDSEAWLLLHSAPKPQ

SEQ ID NO: 14344 - protein, 56 aa, Homo sapiens
  DOMAIN (30)..(55): Fibrinogen beta and gamma chains C-terminal domain proteins domain identified by eMATRIX, accession number BL00514H, p-value= 1.000e-13, raw score of 14.95
  DOMAIN (1)..(55): Fibrinogen beta and gamma chains, C-term domain identified by PFam, accession name fibrinogen_C, E-value=1.1e-08, PFam score of 32.9
YIGGWWDKAGAHSILNGVWYRGGHYKIKHQDGIFWAEYPGGSYSLRAAHMMIRPID

SEQ ID NO: 14345 - protein, 116 aa, Homo sapiens
EGGTGVRSLSFYQHIITVGTGHGSLLFYDIRAQKFLEERASSSLDSMPGPAGRKLKLACGRGWLNQDDVWVNYFGGMGEFPNALYTHCYNWPEMKLFVAGGPLPSGLHGNYAGLWS

SEQ ID NO: 14346 - protein, 561 aa, Homo sapiens
  DOMAIN (346)..(361): G-PROTEIN BETA WD-40 REPEAT SIGNATURE domain identified by eMATRIX, accession number PR00320C, p-value=8.500e-12, raw score of 13.01
  DOMAIN (320)..(486): WD domain, G-beta repeat domain identified by PFam, accession name WD40, E-value=0.00031, PFam score of 27.5
QTYDDGAATRLMSTVKPLREPAPSEDVIDIKPDPDDLIDEDLNFVQENPLSQKKPTVTLTYGSSRPSIEIYRPPASRNADSGVHLNRLQFQQQQNSIHAAKQLDMQSSWVYETGRLCEPEVLNSLEETYSPFFRNNSEKMSMEDENFRKRKLPVVSSVVKVKKFNHDGEEEEEDDDYGSRTGSISSSVSVPAKPERRAFYSGASTHRCFLRGSCCCFSPEGKALPEVSTEWKFFKGKCRYSRGSVFFSSQKRYDFRYSIFTWSKEGGAVKLWDQELRRCRAFRLETGQATDCVRSVCRGKGKILVGTRNAEIIEVGEKNAACNILVNGHVDGPIWGLATHPSRDFFLSAAEDGTVRLWDIADKKMLNKVNLGHAARTVCYSPEGDMVAVGMKNGEFIILLYCFGYLEPLAGPCEFEDWLFISMKKHIGIVIATAPSIHIWDAMNKQTLSILRCYHSKGVCSVSFSATGKLLLSVGLDPEHTITIWRWQEGAKIASRAGHNQRIFVAEFRPDSDTQFVSVGVKHVKFWTLAGRALLSKKGLLSTLEDARMQTMLAIAFGAVA

SEQ ID NO: 14347 - protein, 57 aa, Homo sapiens
  DOMAIN (19)..(34): G-PROTEIN BETA WD-40 REPEAT SIGNATURE domain identified by eMATRIX, accession number PR00320A, p-value=4.960e-12, raw score of 16.74
GHMEGEVWGLATHPYLPICATVSDDKTLRIWDLSPSHCMLAVRKLKKGKRLSHLNVD

SEQ ID NO: 14348 - protein, 571 aa, Homo sapiens
  DOMAIN (291)..(306): G-PROTEIN BETA WD-40 REPEAT SIGNATURE domain identified by eMATRIX, accession number PR00320C, p-value=8.500e-12, raw score of 13.01
  DOMAIN (132)..(546): WD domain, G-beta repeat domain identified by PFam, accession name WD40, E-value=0.0029, PFam score of 24.3
GRCCCFSPDGKALAVGLNDGSFLMANADTLEDLVSFHHRKDMISDIRFSPGIWPVIGEVTDVTASCLTSDKMVLATGDDLGFVKLFRYPTKASSEQGPTTARETPDKQCRQEKETYRATAPSIHIWDAMNKQTLSILRCYHSKGVCSVSFSATGKLLLSVGLDPEHTITIWRWQEGAKIASRAGHNQRIFVAEFRPDSDTQFVSVGVKHVKFWTLAGRALLSKKGLLSTLEDARMQTMLAIAFGAGKILVGTRNAEIIEVGEKNAACNILVNGHVDGPIWGLATHPSRDFFLSAAEDGTVRLWDIADKKMLNKVNLGHAARTVCYSPEGDMVAIGMKNGEFIILLVSSLKIWGKKRDRRCAIHDIRFSPDSRYLAVGSSENSVDFYDLTLGPTLNRISYCKDIPSFVIQMDFSADSSYLQVSSGCYKRHVYEVPSGKHLMGSSAIDRITWATWTSILGDEVLGIWSRHAEKADVNCACVSHSGISLVTGDDFGMVKLFDFPCPEKFAKHKRFLGHSPHVTNIRFTSGDRHVVSAGGDDCRLVTFSAHEEQTMLLVKRLNTTTPTALVYEIS

SEQ ID NO: 14349 - protein, 1951 aa, Homo sapiens
  DOMAIN (916)..(931): G-PROTEIN BETA WD-40 REPEAT SIGNATURE domain identified by eMATRIX, accession number PR00320A, p-value=4.960e-12, raw score of 16.74
  DOMAIN (153)..(1875): WD domain, G-beta repeat domain identified by PFam, accession name WD40, E-value=1.6e-38, PFam score of 141.4
MPLKLQNCLALHPERVLVATGQVGKEPYICIWDSYTVQTISVLKDVHTHGIACLAFDLDGQCSVKAVIDNARRNECGYIPVKLYLQKHSFSLICLPFYSFLDFLDINQRLVSVGLDSKNAVCVWDWKRGKMLSMAPGHTDRFWSLCGNALTPKRGVFGKTGDLQTILCLACARDELTYSGALNGDIYVWKGINLIRTIQGAHAAGIFSMNACEEGFATGGRDGCIRLWDLTFKPITVIDLRETDQGYKGLSVRSVCWRGDHILVGTQDSEIFEIVVQERNKPFLIMQGHCEGELWALAVHPTKPLAVTGSDDRSVRIWSLVDHALIARCNMEEPIRCAAVNADGIHLALGMKDGSFTVLRVRDMTEVVHIKDRKEAIHELKYSPDGTYLAVGCNDSSVDIYGVAQRYKKVGECLGSLSFITHLDWSSDSRYLQTNDGNGKRLFYRMPGGKEVTSTEEIKGVHWASWTCVSGLEVNGIWPKYSDINDINSVDGNYIGQVLVTADDYGIIKLFRYPCLRKESLADSHSDESDSDLSDVPELDSEIEQETQLTYRRQCSAGCTSRAPASAQLLVKPQEAFTHGRRQRGSSYRGYDCRSNLFYTQIGEIVYHVAAVGVIYNRQQNTQRFYLGHDDDILCLTIHPLKDYVATGQVGRDPSIHIWDTETIKPLSILKGHHQYGVSAVDFSADGKRLASVGIDDSHTVVLWDWKKGEKLSIARGSKDKIFVVKMNPYVPDKLITAGIKHMKFWRKAGGGLIGRKGYIGTLGKNDTMMCAVYGWTEEMAFSGTSTGDVCIWRDIFLVKTVKAHDGPVFSMHALEKGFVTGGKDGIVALWDDSFERCLKTYAIKRAALAPGSKGLLLEDNPSIRAISLGHGHILVGTKNGEILEVDKSGPITLLVQGHMEGEVWGLATHPYLPICATVSDDKTLRIWDLSPSHCMLAVRKLKKVQKGNVGLEPPYRVPTGAPPSGVMRRGQPSFRPQNGRTTDSLHHVPGKATGTECQPVKAARKGAILCKTTGAELPKTMGTHLLHQCGLDLRFAGGPLQTFFAWVPPTPRGITSGGCKTVKRVTELIPVETPLYKVSSNPCWGGLTQSGGTGSRTHLMKHSDYPLAEGVHYTGGNPTCPDCPDSSELGAQSSEAADSQSDDSRPFPQELGSLRQSVAKWPLRICAALCLGLKELVAWAHGGDLLIHQLHRSMEKVWFPGQDSTITHCLSWLGVGAPLVLCSSQKAATLVLRESEQVKGDSDLFGNGVAATRTFSELVAKKLARGCSPQWNSESSHLVKEKLARGSRPELNGGRCCCFSPDGKALAVGLNDGSFLMANADTLEDLVSFHHRKDMISDIRFSPGIWPVIGEVTDVTASCLTSDKMVLATGDDLGFVKLFRYPTKGKFGKFKRYVAHSTHVTNVRWTYDDSMLVTLGGTDMSLMVWTNEMEGYREKRPCDSEESDIDSEEDGGYDSDVTRENEISYTIRALSTNIRPMLGIKPHLQQKEPSIDERPPVSRAPPQPEKLQTNNVGKKKRPIEDLVLELIFGYRGRDCRNNVHYLNDGDDIIYHTASVGILHNVATGSQSFYQEHNDDILCLTVNQHPKFINIVATGQVATAPSIHIWDAMNKQTLSILRCYHSKGVCSVSFSATGKLLLSVGLDPEHTITIWRWQEGAKIASRAGHNQRIFVAEFRPDSDTQFVSVGVKHVKFWTLAGRALLSKKGLLSTLEDARMQTMLAIAFGANNLTFTGTISGDVCVWKDHILCRIVARAHNGPVFAMYTTLRDGLIVTGGKERPSKEGGAVKLWDQELRRCRAFRLETGQATDCVRSVCRGKGKILVGTRNAEIIEVGEKNAACNILVNGHVDGPIWGLATHPSRDFFLSAAEDGTVRLWDIADKKMLNKVNLGHAARTVCYSPEGDMVAIGMKNGEFIILLVSSLKIWGKKRDRRCAIHDIRLVNKWNRVSSIYLI

SEQ ID NO: 14350 - protein, 174 aa, Homo sapiens
  misc_feature (1)...(174): Xaa = X or * as defined in Table 2
SLVLDLTGLPRPTSPSHERGLDSSSSGPGLSTGPXECSPDPNPMCPKVLPGPDQRCWNSHSTAPIAFPEPVRSRXSGSWTPVPATGATLNPRCQRGLAIPNSLVSSPXGPAGWRELPSSQQAHPHPKRXGALRSENRQEGPDQGCGNCFVKYGGRVGRVGYSGPVRTGCSRASN

SEQ ID NO: 14351 - protein, 141 aa, Homo sapiens
  misc_feature (1)...(141): Xaa = X or * as defined in Table 2
LKQQIEEQRVQVQVVERAQQVAVQEQEIARAEAEQMAKKAEAFQLYQEAAQLDMLLEKLPQVAEEISGPLTSANKITLVSSGSGTMGAAKVTGEVLDILTRLPESVERLTGVTILPRLNHKAFXRTALSLQPSQMPSLIAE

SEQ ID NO: 14352 - protein, 428 aa, Homo sapiens
  DOMAIN (1)..(188): SPFH domain / Band 7 family domain identified by PFam, accession name Band_7, E-value=0.0029, PFam score of -45.7
TMFFTCGPNEAMVVSGFCRSPPVMVAGGRVFVLPCIQQIQRISLNTLTLNVKSEKVYTRHGVPISVTGIAQVKIQGQNKEMLAAACQMFLGKTEAEIAHIALETLEGHQRAIMAHMTVEEIYKDRQKFSEQVFKVASSDLVNMGISVVSYTLKDIHDDQDYLHSLGKARTAQVQKDARIGEAEAKRDAGIREAKAKQEKVSAQYLSEIEMAKAQRDYELKKAAYDIEVNTRRAQADLAYQLQVAKTKQQIEEQRVQVQVVERAQQVAVQEQEIARREKELEARVRKPAEAERYKLERLAEAEKSQLIMQAEAEAASVRMRGEAEAFAIGARARAEAEQMAKKAEAFQLYQEAAQLDMLLEKLPQVAEEISGPLTSANKITLVSSGSGTMGAAKVTGEVLDILTRLPESVERLTGVSISQVNHKPLRTA

SEQ ID NO: 14353 - protein, 110 aa, Homo sapiens
GWELLVTKVRKDDQWNEDLKTQSKLFYEECGQIMGTEWVSLSCQVAEEISGPLTSANKITLVSSGSGTMGAAKVTGEVLDILTRLPESVERLTGVSISQVRSQVGAEENC

SEQ ID NO: 14354 - protein, 469 aa, Homo sapiens
  DOMAIN (1)..(188): SPFH domain / Band 7 family domain identified by PFam, accession name Band_7, E-value=0.0029, PFam score of -45.7
  misc_feature (1)...(469): Xaa = X or * as defined in Table 2
TMFFTCGPNEAMVVSGFCRSPPVMVAGGRVFVLPCIQQIQRISLNTLTLNVKSEKVYTRHGVPISVTGIAQVKIQGQNKEMLAAACQMFLGKTEAEIAHIALETLEGHQRAIMAHMTVEEIYKDRQKFSEQVFKVASSDLVNMGISVVSYTLKDIHDDQDYLHSLGKARTAQVQKDARIGEAEAKRDAGIREAKAKQEKVSAQYLSEIEMAKAQRDYELKKAAYDIEVNTRRAQADLAYQLQVAKTKQQIEEQRVQVQVVERAQQVAVQEQEIARREKELEARVRNPAEAERYKLERPAEAEKSQLIMQAEAKAASVRMRGEAEGLCPXGPEPRAEAEQMAKKAEAFQLVPRGVAQLDMLRRESCPRWQEEISGPLNFSPIRSPLVSSGSGTMGAAKVTGEVLDILNSPCPESVERLTGREHLPRVNHKPLKNSLEPSALHRCPASLAEVALNDPPVACNPLGLPEHVH

SEQ ID NO: 14355 - protein, 109 aa, Homo sapiens
FFFFFFERESYSLAQAGVQWHNLSSLQPLPSGFKRFSCLSLPSSRDHERAPSHLAVVFLVEMGFHHVGQASLELLTSSDPPALASQSSGITVVSHHARPGILNSINRFT

SEQ ID NO: 14356 - protein, 67 aa, Homo sapiens
MELRLSANANWPALTGGAWPRRSHQASSLGYCCVSSSAVCSASLSGRRRGRHEPLVSPPPYRHLTML

SEQ ID NO: 14357 - protein, 164 aa, Homo sapiens
  DOMAIN (74)..(98): Glycosyl transferases group 1 domain identified by eMATRIX, accession number PF00534B, p-value=4.857e-09, raw score of 14.47
  DOMAIN (77)..(131): Glycosyl transferases group 1 domain identified by PFam, accession name Glycos_transf_1, E-value=0.022, PFam score of 13.2
FPASRLVTLCSEPEDAAMERSAFMELDAGSRLVMHLREWPALLVSSTGWTEFEQLTLDGHNLPSLVCVITGSVDLGVCLHMSSSGLDLPMKVVDMFGCCLPVCAVNFKCLHELVKHEENGLVFEDSKELAALQMFFSHFPDPAGKLNQFWKDLRESQQLRWDES

SEQ ID NO: 14358 - protein, 37 aa, Homo sapiens
ALLFIFLQMLFSNFPDPAGKLNQFRKNLRESQQLRWD

SEQ ID NO: 14359 - protein, 191 aa, Homo sapiens
PYSSCPMTRASSPKELQQFVVSGSPMRAPEEEPEDPDTERSAFMERDAGSGLVMRLRERPALLVSSTGWTGSVDLGVCLHTSCSGLDLPMKVVDMFGCCLPVCAVNFKWQEQNPNLSGDSFTDPPLRRKQCRASCPHLHELVKHEENGLVFEDSEELAAQLQVLFSNFPDPAGKLNQFRKNLRESQQLRWD

SEQ ID NO: 14360 - protein, 280 aa, Homo sapiens
  misc_feature (1)...(280): Xaa = X or * as defined in Table 2
MPGLRVKMPCGPGISQDEAVWSMDDNFEVNKQHPVWRAATLAKDCKNQSAQAVTVYNKPASFFKEAPLDLQHRLFMKLGSTHSPFRARVFFCSFISEPEDPATERLAFTERDAGSRLVTLLHERPALLVSSTSWTGKGPLREYYSRLIYQKHFQHIQVCTPWLGAEDYPLLIGSADLGVCLHTSSSGLDLPLXKVVDMFGCCLPVCAVNFKVFTELVKHEENGLVFEDSEELAAQLQMLFSNFPDPAGKLNSFRKNLPESQQLXWDESWVQTVLPLVMDT

SEQ ID NO: 14361 - protein, 95 aa, Homo sapiens
  DOMAIN (28)..(56): !!!! PROTEIN ALU SUBFAMILY WARNING ENTRY NUCLEAR PHOSPHO domain identified by eMATRIX, accession number PD02454B, p-value= 4.462e-24, raw score of 11.61
  misc_feature (1)...(95): Xaa = X or * as defined in Table 2
EGSHGLGVVAHACNPSTLGNRCGVDHLSSGVQGQPGQHGKTPFLQKIQKLAGHGGTRLXSSYLRLRWEDEGGRGCSEPRSRHCTPAPWATEXDPV

SEQ ID NO: 14362 - protein, 388 aa, Homo sapiens
  DOMAIN (49)..(220): Zinc finger C-x8-C-x5-C-x3-H type domain identified by PFam, accession name zf-CCCH, E-value=0.064, PFam score of 12.7
FHHLTETNSPNYFITMALNVAPVRDTKWLTLEVCRQFQRGTCSRSDEECKFAHPPKSCQVENGRVIACFDSLKGRCSRENCKYLHPPTHLKTQLEINGRNNLIQQKTAAAMLAQQMQFMFPGTPLHPVPTFPVGPAIGTNTAISFAPYLAPVTPGVGLVPTEILPTTPVIVPGSPPVTVPGSTATQKLLRTDKLEVCREFQRGNCARGETDCRFAHPADSTMIDTSDNTVTVCMDYIKGRCMREKCKYFHPPAHLQAKIKAAQPQAAATVMTQSTAKAMKRPLEATVDLAFPPGALHPLPKRQALEKSNGTSAVFNPSVLHYQQALTSAQLQQHAAFIPTGSVLCMTPATSIVPMMHSATSATVSAATTPATSVPFAATATANQIILK

SEQ ID NO: 14363 - protein, 80 aa, Homo sapiens
  DOMAIN (30)..(60): POLYPROTEIN GLYCOPROTEIN M PRECURSOR CONTAINS: domain identified by eMATRIX, accession number PD02205J, p-value=9.020e- 09, raw score of 16.47
ALHPLPKRQALEKSNGTSAVFNPSVLHYQQALTSAQLQQHAAFIPTGMCPYCPTSCALLVMCFLLISLSCLVASSLLLKV

SEQ ID NO: 14364 - protein, 116 aa, Homo sapiens
AARVMTQSTAKAMKRPLEATVDLAFPPGALHPLPKRQALEKSNGTSAVFNPSVLHYQQALTSAQLQQHAAFIPTDNSEIISRDGMECQESALRITRHCYCTYYPVSSSVELPRTAC

SEQ ID NO: 14365 - protein, 207 aa, Homo sapiens
MTAFFVKPANVCQLPHWNDIISNSLYWERYKKRENASSSSTCSSGQVSFLEKKVLAMEDKHIIQLQSIKEEKDQLQVLVSKQNSIIEELEKKIVTATVNNSVLQKQQHDLMETVNNLLTMMSTSNYLQIVMEMSQAFFQKHCRTPNKEWKFSGGGGVNRGQRGCRVKPTAVTPEAHPSPRVGTNVENLGNGEQASFGTYPCFRFTPE

SEQ ID NO: 14366 - protein, 119 aa, Homo sapiens
SDVTFSGKPSLVTLFPLYPPGKFSFSSVDVSMLQSTIKHGSCSLWASPSEEFDILEVVPLFCVLFRPTASFISSRLPSKGVKSSSCPFGKEAGVLNGCKEKAIFPLGACVFFPSLSTTP

SEQ ID NO: 14367 - protein, 870 aa, Homo sapiens
  DOMAIN (144)..(173): kw REPLICATION REPB REPA INITIATION domain identified by eMATRIX, accession number DM00653A, p-value=7.207e-27, raw score of 20.40
  DOMAIN (128)..(170): Initiator RepB protein domain identified by PFam, accession name RepB_protein, E-value=0.0091, PFam score of 12.3
MAETAVINHKKRKNSPRIVQSNDLTEAAYSLSRDQKRMLYLFVDQIRKSDGTLQEHDGICEIHVAKYAEIFGLTSAEASKDIRQALKSFAGKEVVFYRPEEDAGDEKGYESFPWFIKRAHSPSRGLYSVHINPYLIPFFIGLQNRFTQFRLSETKEITNPYAMRLYESLCQYRKPDGSGIVSLKIDWIIERYTATIATTQRCAQIQTKRGVRELPAGEEAFRIELGGHYTGSNLEHVGPVSTEHTPSVVEEDTVRSRDFQCTGLKSLKIVRDSSSAYNNFRKSMDSIGKKQYQVQHGSCSYTFLLPEMDNCRSSSSPYVSNAVQRDAPLEYDDSVQRLQVGDNSIDSWKNAGRVFKDSDKWDANDPILKDQTQEWSGSATFTSDGKIRLFYTDYSGKHYGKQSLTTAQVNVSKSDDTLKINGVEDHKTIFDGDGKTYQNVQQFIDEGNYTSGDNHTLRDPHYVEDKGHKYLVFEANTGTENGYQGEESLFNKAYYGGGTNFFRKESQKLQQSAKKRDAELANGALELEKTTLKFIWNQKRARIAKSILSQKNKAGGIKLPDFKLYYKATVNKTAWCAQIQTKRGVRELPAGEEAFRIELGGHYTGGCSETLSQGSLGDPVGLLTSQRGGGRLSPRVRTTLRRPCLPRLFGMAALWDHCLNKLPACLPLSQALLLGKPKLRQCENLLVVPLRRGLRTACEPRNFVGVVEAKAERVNSIYNHGVPRKKRSQSNMHVFPANDPTVAKEEQISFRDCAEVFKSGHTTNGIYTLTFPNSTEEIKPTAVTPEAHPSPRVGTNVENLGNGEQASFGTYPCFRFTPEGRACGALSLPPLTFQQVLEFDSHQTEIAKICKNSIGQLFCINDCTGSKGQK

SEQ ID NO: 14368 - protein, 572 aa, Homo sapiens
  DOMAIN (387)..(424): Fibrinogen beta and gamma chains C-terminal domain proteins domain identified by eMATRIX, accession number BL00514C, p-value= 4.000e-29, raw score of 17.41
  DOMAIN (356)..(570): Fibrinogen beta and gamma chains, C-term domain identified by PFam, accession name fibrinogen_C, E-value=6.2e-74, PFam score of 257.5
AGLFFPLQSDSLLHAWREHSSKNQVCYWKKRKEKTFIDGPSHGSVAALRFRRQQLGTLDVCLPSSLLSCWFITEERMWQIVFFTLSCDLVLAAAYNNFRKSMDSIGKKQYQVQHGSCSYTFLLPEMDNCRSSSSPYVSNAVQRDAPLEYDDSVQRLQVLENIMENNTQWLMKLENYIQDNMKKEMVEIQQNAVQNQTAVMIEIGTNLLNQTAEQTRKLTDVEAQVLNQTTRLELQLLEHSLSTNKLEKQILDQTSEINKLQDKNSFLEKKVLAMEDKHIIQLQSIKEEKDQLQVLVSKQNSIIEELEKKIVTATVNNSVLQKQQHDLMETVNNLLTMMSTSNSAKDPTVAKEEQISFRDCAEVFKSGHTTNGIYTLTFPNSTEEIKAYCDMEAGGGGWTIIQRREDGSVDFQRTWKEYKVGFGNPSGEYWLGNEFVSQLTNQQRYVLKIHLKDWEGNEAYSLYEHFYLSSEELNYRIHLKGLTGTAGKISSISQPGNDFSTKDGDNDKCICKCSQMLTGGWWFDACGPSNLNGMYYPQRQNTNKFNGIKWYYWKGSGYSLKATTMMIRPADF

SEQ ID NO: 14369 - protein, 477 aa, Homo sapiens
  DOMAIN (191)..(228): Fibrinogen beta and gamma chains C-terminal domain proteins domain identified by eMATRIX, accession number BL00514C, p-value= 5.869e-22, raw score of 17.41
  DOMAIN (160)..(223): Fibrinogen beta and gamma chains, C-term domain identified by PFam, accession name fibrinogen_C, E-value=2.7e-22, PFam score of 79.8
MPNRRGRQGRRRVVRTRGLMRPPPRWLPTAVTPEAHPSPRVGTNVENLGNGEQASFGTYPCFRFTPEGSFLEKKVLAMEDKHIIQLQSIKEEKDQLQVLVSKQNSIIEELEKKIVTATVNNSVLQKQQHDLMETVNNLLTMMSTSNSAKDPTVAKEEQISFRDCAEVFKSGHTTNGIYTLTFPNSTEEIKAYCDMEAGGGGWTIIQRREDGSVDFQRTWKEYKVMTDVSRIFAIQLTMVQLKIFRLYDVICGTMLPHDARQRQRATGPSQSCDPQGEQQTLRAPCCQMALSDCGLMIHLKGLTGTAGKISSISQPGNDFSTKDGDNDKCICKCSQMLTGDEYFAGGLHSSFDDLCGNSGCGNQERKLEGSINDIKSDVCISSLVLKANNIHSSPSFTHLDKSSPQEISEVIFQREEINLAKEILQGKVVHPSPKRQGCRVCLQGGRLEERYPFVFLPLFFQQKGHLLDTFQDPGVPQ

SEQ ID NO: 14370 - protein, 107 aa, Homo sapiens
  DOMAIN (33)..(90): Immunoglobulin domain identified by PFam, accession name ig, E-value=0.00093, PFam score of 17.2
HSLHSALSLEVTGSTKLPKPYITINNLNPRENKDVLNFTCEPKSENYTYIWWLNGQSLPVSPRVKRPIENRILILPSVTRNETGPYQCEIRDRYGGIRSDPVTLNVL

SEQ ID NO: 14371 - protein, 139 aa, Homo sapiens
ETPKPSISSSNLNPREVMEAVRLICDPETPDASYLWLLNGQNLPMTHRLQLSKTNRTLYLFGVTKYIAGPYECEIRNPALLNDCHNTNTEKKKQPEKVESSDDIENSNQPFSHPKAFKNIRVQHGHYGIHRKLITKLET

SEQ ID NO: 14372 - protein, 71 aa, Homo sapiens
  misc_feature (1)...(71): Xaa = X or * as defined in Table 2
MMVRLSYIQPAGSEESRLQNDAXQPDWIFEWKKCSRIYGRTVAPAAKLPRKHRGNPFCFPRTXERRNKTKT

SEQ ID NO: 14373 - protein, 183 aa, Homo sapiens
  DOMAIN (60)..(105): CARCINOEMBRYONIC ANTIGEN PRECURSOR AMINO-TERMINAL DOMAIN domain identified by eMATRIX, accession number DM00372B, p-value= 5.737e-35, raw score of 20.31
SLLNFWNLPITAQVTIEALPPKVSEGKDVLLLVHNLPQNLAGYIWYKGQLMDLYHYITSYVVDGQINIYGPAYTGRETVYSNASLLIQNVTREDAGSYTLHIIKRGDRTRGVTGYFTFNLYHTSYLWWMNGQSLPMTHRLQLSKTNRTLFIFGVTKYIAGPYECEIRNPVSASHSDPVTLNLL

SEQ ID NO: 14374 - protein, 199 aa, Homo sapiens
  DOMAIN (60)..(105): CARCINOEMBRYONIC ANTIGEN PRECURSOR AMINO-TERMINAL DOMAIN domain identified by eMATRIX, accession number DM00372B, p-value= 8.971e-38, raw score of 20.31
  DOMAIN (41)..(182): Immunoglobulin domain identified by PFam, accession name ig, E-value=0.0011, PFam score of 16.9
SLLNFWNLPTTAQVTIEAQPPKVSEGKDVLLLVHNLPQNLTGYIWYKGQIRDLYHYITSYVVDGQIIIYGPAYSGRETAYSNASLLIQNVTREDAGSYTLHIIKRGDGTRGVTGYFTFTLYREAMETVILTCDPETPDTSYQWWMNGQSLPMTHRFQLSETNRTLFLFGVTKYTAGPYECEIRNSGSASRSDPVTLNLL

SEQ ID NO: 14375 - protein, 182 aa, Homo sapiens
  DOMAIN (84)..(120): CARCINOEMBRYONIC ANTIGEN PRECURSOR AMINO-TERMINAL DOMAIN domain identified by eMATRIX, accession number DM00372C, p-value= 4.600e-24, raw score of 23.69
  DOMAIN (18)..(159): Immunoglobulin domain identified by PFam, accession name ig, E-value=3.5e-10, PFam score of 37.8
ETPKPSISSSKLNPREAMEAVSLTCDPETPDASYLWWMNGQSLPMSHRLQLSETNRTLFLLGVTKYTAGPYECEIRNPVSASRSDPFTLNLLHGPDLPRIYPSFTYYRSGEVLYLSCSADSNPPAQYSWTINGKFQLPGQKLFIPQITTKHSGLYACSVRNSATGKESSKSMTVKVSDWTLP

SEQ ID NO: 14376 - protein, 34 aa, Homo sapiens
AGSYTLHIIKGDDGTRGVTGRFTFTLHRIQTSEE

SEQ ID NO: 14377 - protein, 482 aa, Homo sapiens; identical to SEQ ID NO: 11077
  DOMAIN (77)..(122): CARCINOEMBRYONIC ANTIGEN PRECURSOR AMINO-TERMINAL DOMAIN domain identified by eMATRIX, accession number DM00372B, p-value= 8.750e-37, raw score of 20.31
  DOMAIN (100)..(452): Immunoglobulin domain identified by PFam, accession name ig, E-value=1.2e-07, PFam score of 29.6
  misc_feature (1)...(482): Xaa = X or * as defined in Table 2

SEQ ID NO: 14378 - protein, 144 aa, Homo sapiens
ETPKPSISSSNLYPREDMEAVSLTCDPETPDASYLWWMNGQSLPMTHSLQLSKNKRTLFLFGVTKYTAGPYECEIRNPVSASRSDPVTLNLLQHSWLIDGKFQQSAQVFFIPQITKTYRGVYVCFIHNSATAGTNLIIKRIIVP

SEQ ID NO: 14379 - protein, 479 aa, Homo sapiens
  DOMAIN (70)..(115): CARCINOEMBRYONIC ANTIGEN PRECURSOR AMINO-TERMINAL DOMAIN domain identified by eMATRIX, accession number DM00372A, p-value= 5.378e-38, raw score of 19.18
  DOMAIN (156)..(447): Immunoglobulin domain identified by PFam, accession name ig, E-value=3.7e-16, PFam score of 57.1
EASLLEDDDGMVYLRPLTSHQYRTAQLRAMLRKFLDPRLSSTEENTQAAETMGPLSAPPCTQRITWKGLLLTASLLNFWNPPTTAQVTIEAEPTKVSKGKDVLLLVHNLPQNLAGYIWYKGQMKDLYHYITSYVVDGQIIIYGPAYSGRETVYSNASLLIQNVTREDAGSYTLHIVKRGDGTRGETGHFTFTLYLETPKPSISSSNLYPREDMEAVSLTCDPETPDASYLWWMNGQSLPMTHSLQLSKNKRTLFLFGVTKYTAGPYECEIRNPVSASRSDPVTLNLLPKLPKPYITINNLNPRENKDVLAFTCEPKSENYTYIWWLNGQSLPVSPRVKRPIENRILILPSVTRNETGPYQCEIQDRYGGIRSYPVTLNVLYGPDLPRIYPSFTYYHSGENLYLSCFADSNPPAEYSWTINGKFQLSGQKLFIPQITTKHSGLYACSVRNSATGMESSKSMTVKVSAPSGTGHLPGLNPL

SEQ ID NO: 14380 - protein, 413 aa, Homo sapiens
  DOMAIN (234)..(270): CARCINOEMBRYONIC ANTIGEN PRECURSOR AMINO-TERMINAL DOMAIN domain identified by eMATRIX, accession number DM00372C, p-value= 3.167e-15, raw score of 23.69
  DOMAIN (40)..(314): Immunoglobulin domain identified by PFam, accession name ig, E-value=8.2e-13, PFam score of 46.3
  misc_feature (1)...(413): Xaa = X or * as defined in Table 2
MKDACGGIKGATQDNLLLSTQPKLPMPYITINNLNPREKKDVLAFTCEPKSRNYTYIWWLNGQSLPVSPRVKRPIENRILILPSVTRNETGPYQCEIRDRYGGIRSNPVTLNVLCEYPLFLCGPGHQLNSKRPEARPLSLSPVQVXTTLLLDIRPGHDSLPWEILGRHSLNQEYKGRGALVMGHXGPTACNERNRGIPQAWAXXTXMGFGCHLRLCLGSEGHCVPLRDQEHPLPLDDITCGFILFPPDGPDLPRIYPSFTYYRSGENLDLSCFADSNPPAEYSWTINGKFQLSGQKLFIPQITTNHSGLYACSVRNSATGKEISKSMIVKVSGKWIPASLAIGFXVESIWLSEKSQENICIPRLCPMGTSKSQILLLNPPNLSLQTLFCLFFCFLMADLVSGLRKVGRGLYQP

SEQ ID NO: 14381 - protein, 452 aa, Homo sapiens
  DOMAIN (43)..(88): CARCINOEMBRYONIC ANTIGEN PRECURSOR AMINO-TERMINAL DOMAIN domain identified by eMATRIX, accession number DM00372A, p-value= 4.000e-39, raw score of 19.18
  misc_feature (1)...(452): Xaa = X or * as defined in Table 2
QPVLREFLDPRLISTEENTQAAETMGTLSAPPCTQRIKWKGLLLTASLLNFWNLPTTAQVTIEAEPTKVSEGKDVLLLVHNLPQNLTRATIWYKGQMRHLYHYITSYVVDGEIIIYGPAYSGRETAYSNASLLIQNVTREDAGSYTLHIIKRGDRTRGVTGYFTFNLYLETPKPSISSSNLNPREAMETVILTCNPETPDASYLWXLNGQNLPMTHSLQLSKANRTLYLFGVTNYTAGPYECEIWELRECQARSDPVTPEFSSRKLPKPYITINNLNPGEEXGCLXTFICEPKSENYTYIWWLNGQKPPVSSPRVKRPHXKTGSLIPTPVFTRKWKQGPYSMWNYGDRYGGIRSLPSSPLNCSSYGSRTSPRILPFHFTYYRFREENLDLFLGFTGIFNPPAQYSWDNXWKSFQLTRGQKLFYSGHITTKHSGLYVCSVRNSATWQGKAPNP

SEQ ID NO: 14382 - protein, 105 aa, Homo sapiens
  misc_feature (1)...(105): Xaa = X or * as defined in Table 2
RWSLCPLQAGVQWRDLCSLKPPPPEFKQFSCLSLPSSXDYRCPPPCPANFSFFFVFLVETGFHHVGQAGLNLLTSRDLLTSASQSAEITGMSHCPRPTLSNSRVL

SEQ ID NO: 14383 - protein, 171 aa, Homo sapiens
  DOMAIN (49)..(167): PWI domain identified by PFam, accession name PWI, E-value= 2.2e-21, PFam score of 84.5
  misc_feature (1)...(171): Xaa = X or * as defined in Table 2
CKMDAGFFRGTSAEQDNRVSNKQKKLLKQLKFAECLEKKVDMSKVNLEVIKPWITKRVTEILGFEDDVVIEFIFNQLEVKAXTKMEVIPCVXSIAPSPYXVTAEXVSQCRSDPTPLMMQCVFGNPDSKMMQINLTGFLNGKNAREFMGELWPLLLSAQENIAGIPSAFLEL

SEQ ID NO: 14384 - protein, 178 aa, Homo sapiens
MSWLEENVHEVLQAVDAGDPAVEACENRRKVLYQRAPRNIHRHVILSEIKEAVAALPPPHPKLMRKPHGPPGESRACAQLLLLCPLAAPPCPCEGGSWQAAPLSPISHGNTIALFFRSLLPNYTMEGERPEEGVAGGLNRNHGLNRLMLAVRDMMANFHLNDLEAPHEDDAEGEGEWD

SEQ ID NO: 14385 - protein, 109 aa, Homo sapiens
TRHLVLRASSSQGPWGGFRVRCWGKGPPRAPQCLLLGPRAPSPSTDSPLLRHVPLLQGERPEEGVAGGLNRNQGLNRLMLAVRDMMANFHLNDLEAPHEDDAEGEGEWD

SEQ ID NO: 14386 - protein, 551 aa, Homo sapiens
KKKKKQKNKKSSTGEASENGLEDIDRILERIEDSTGLNRPGPAPLSSRKHVLYVEHRHLNPDTELKRYFGARAILGEQRPRQRQRVYPKCTWLTTPKSTWPRYSKPGLSMRLLESKKGLSFFAFEHSEEYQQAQHKFLVAVESMEPNNIVVLLQTSPYHVDSLLQLSDACRFQEDQEMARDLVERALYSMECAFHPLFSLTSGACRLDYRRPENRSFYLALYKQMSFLEKRGCPRTALEYCKLILSLEPDEDPLCMLLLIDHLALRARNYEYLIRLFQEWEAHRNLSQLPNFAFSVPLAYFLLSQQTDLPECEQSSARQKASLLIQQALTMFPGVLLPLLESCSVRPDASVSSHRFFGPNAEISQPPALSQLVNLYLGRSHFLWKEPATMSWLEENVHEVLQAVDAGDPAVEACENRRKVLYQRAPRNIHRHVILSEIKEAVAALPPDVTTQSVMGFDPLAPSDTIYSYVRPERLKSLSSHGNTIALFFRSLLPNYTMEGERPEEGVAGGLNRNQGLNRLMLAVRDMMANFHLNDLEAPHEDDAEGEGEWD

SEQ ID NO: 14387 - protein, 68 aa, Homo sapiens
IILWVLNAFLQPPGRHMIAIRERQPGRTNSDYETADGVYMTLNPRAPTDDDKNIYLTLPPNDHVNSNN

SEQ ID NO: 14388 - protein, 126 aa, Homo sapiens
  DOMAIN (25)..(74): Eukaryotic protein kinase domain identified by PFam, accession name pkinase, E-value=5.7e-08, PFam score of 32.7
FRVDDFVQKLQAGSIAIVRQTFNKEIKTMKKFESPNILRIFGIWIDETVTPPQFSIVMEYCELGTLRELLDREKDLTLGKRMVLVLGAARGLYRLHHSEAPELHGKIRSSNLLVTQGYQVKIWVPG

SEQ ID NO: 14389 - protein, 218 aa, Homo sapiens
  DOMAIN (139)..(155): Protein kinases ATP-binding region proteins domain identified by eMATRIX, accession number BL00107B, p-value=1.529e-09, raw score of 13.31
  DOMAIN (7)..(211): Eukaryotic protein kinase domain identified by PFam, accession name pkinase, E-value=7.8e-22, PFam score of 82.7
VKCRGIPNILRIFGICIDETVTPPQFSIVMEYCELGTLRELLDREKDLTLGKRMVLVLGAARGLYRLHHSEAPELHGKIRSSNFLVTQGYQVKLAGFELRKTQTSMSLGTTREKTDRVKSTAYLSPQELEDVFYQYDVKSEIYSFGIVLWEIATGDIPFQGCNSEKIRKLVAVKRQQEPLGEDCPSELREIIDECRAHDPSVRPSVDEILKKLSTFSK

SEQ ID NO: 14390 - protein, 280 aa, Homo sapiens
MATSELSCEVSEENCERREAFWAEWKDLTLSTCQVQSCPRAFAWAVHCVECCSPHCPDHPVYKPASPPPSLCAAFLLCALSEDTGHQGHPLSLPLACESERRMDGASPCHLSPCTCYPCRGAAPATFTLQKRVLGLREGIKWPEVTWRSKWPSLQPSEGAALVEKATLGTGEPVWSMSQTSLLPSHGPGLSVSARLCPWPTPSPPRLGPSGPAGGVNEPSCSSAALAWHVGSDEWQVPGRQRGRVRGQGLRRHCCLCVKTLGRPCPYPAPTGTGQRLQVG

SEQ ID NO: 14391 - protein, 96 aa, Homo sapiens
  misc_feature (1)...(96): Xaa = X or * as defined in Table 2
GSLKQGMFPSGLNRRLPTESPLQILRATFLXKEVAXGLHQYHLPLQLLSGPVFGLTHLQSAPVFREKPDDPPELPSLRVLRRTLDSWGARTHNYGI

SEQ ID NO: 14392 - protein, 41 aa, Homo sapiens
RALTRKTNSKAEPCLLPAQPTCNFPPSVARRRNINLARPRD

SEQ ID NO: 14393 - protein, 253 aa, Homo sapiens
  misc_feature (1)...(253): Xaa = X or * as defined in Table 2
TWRLDPQIISSPKPQPGGTYTLEVVKSSKSKKVLSPHPXWPPLRLWQRGGSPEGGTQAPDGSLPPPPPRPKSERVGSPKLSGGKREGSHPGGPPHITHPDGEEKAKSSWFGLREAKDPTQKPSPHPVKPLSAAPVEGSPDRKQSRSSLSIALSSGLEKLKTVTSGSIQPVTQAPQAGQMVDTKRLKDSAVLDQSAKYYHLTHDELISLLLQRERELSQRDEHVQELESYIDRLLVRIMETSPTLLQIPPGPPK

SEQ ID NO: 14394 - protein, 84 aa, Homo sapiens
  DOMAIN (21)..(49): !!!! PROTEIN ALU SUBFAMILY WARNING ENTRY NUCLEAR PHOSPHO domain identified by eMATRIX, accession number PD02454B, p-value= 6.815e-18, raw score of 11.61
  misc_feature (1)...(84): Xaa = X or * as defined in Table 2
GAVAHICKSQQFGRPRQAHQLRSRVXDQPGQNDETPSILKIQKLAGHGGTRPLSQLLRRLRHXNHLNPGGGGCSELRSRHCIPG

SEQ ID NO: 14395 - protein, 253 aa, Homo sapiens
RDPPSLSSASPPGSRESSIHSGPEELPTPPEPDFPPPPLPPWASHHRGGPSPPCSPLSEAWPLTTSSAPPGEPALLPGPHEPSPPGGSPALLREDLAAATPASPLVLLPLETRPAEEPQPSASPHPVKPLSAAPVEGSPDRKQSRSSLSIALSSGLEKLKTVTSGSIQPVTQAPQAGQMVDTKRLKDSAVLDQSAKYYHLTHDELISLLLQRERELSQRDEHVQELESYIDRLLVRIMETSPTLLQIPPGPPK

SEQ ID NO: 14396 - protein, 72 aa, Homo sapiens
  DOMAIN (6)..(44): WD domain, G-beta repeat domain identified by PFam, accession name WD40, E-value=0.038, PFam score of 20.6
DFADDDLVLKELRGHSSFVNEATFTQDGHYIISASSDGTVKVKYLLSVYFGMSTPSLSFEEFSVVIMGMIVL

SEQ ID NO: 14397 - protein, 24 aa, Homo sapiens
WGRLCICEGRGYMGNLCTFCPILL

SEQ ID NO: 14398 - protein, 133 aa, Homo sapiens
  misc_feature (1)...(133): Xaa = X or * as defined in Table 2
SRSRRGQKRRRWSTVWRLSAGACALSMQTPSRTSWPTAPFRAIWRAETVAAWCRLRRPVWRVWSWSCLPTPITRATPLGARSWPGWRMWPPLQPAGSAVPTLRXRPLKFPLPRPVPGRRPSGAQSHREQCLQT

SEQ ID NO: 14399 - protein, 784 aa, Homo sapiens
  DOMAIN (42)..(719): Eukaryotic protein kinase domain identified by PFam, accession name pkinase, E-value=3.6e-44, PFam score of 160.2
  misc_feature (1)...(784): Xaa = X or * as defined in Table 2
MTLKEHAAFKHLFNKAHLAPPLIHLTLSGHSTCFREHWVGDIVHRDLKLENIMVKSSLIDDNNEINLNIKVTDFGLAVKKQSRSEAMLQATCGTPIYMDRGWNSLEGSEQDRKMWDSLELPRDLLNVFEQNADNDMDDEIQAEVLSDGDEELLGNWSKGDSCYVLLKQLAAFCPCLRDLWNFKLERDDLGYLVEEISKQQSIQEATWVLLKAFSFIREAEHKNLENLQPDNAIEKKIPFSEEKFKLAAEICISNQEANVNPQDNEKNVSRACQRSSQQPLPLPRVLGGKSGFVGWAQDSHAEIYTFGRILGKGSFGIVIEATDKETETKWAIKKVNKEKLLLMKSNFLQPVRTTLICAVQVSHLANSFQLKSREKWRKPLXLKEHAAFKHLFNKAHLAPPLIHLTLSGHSTCFREHWVGDIVHRDLKLENIMVKSSLIDDNNEINLNIKVTDFGLAVKKQSRSEAMLQATCGTPIYMDRGWNSLEGSEQDRKMWDSLELPRDLLNVFEQNADNDMDDEIQAEVLSDGDEELLGNWSKGDSCYVLLKQLAAFCPCLRDLWNFKLERDDLGYLVEEISKQQSIQEATWVLLKAFSFIREAEHKNLENLQPDNAIEKKIPFSEEKFKLAAEICISNQEANVNPQDNEKNVSRACQRSSQQPLPLPRVLGGKSGFVGWAQDSHAEIYTFGRILGKGSFGIVIEATDKETETKWAIKKVNKEKSTAYEKQFPATSKDNFDMCSSSFTSSKLLPAEIKGEMEKTPVTPSQGTATKYPAKSGALSRTKKKL

SEQ ID NO: 14400 - protein, 256 aa, Homo sapiens
  DOMAIN (124)..(140): Protein kinases ATP-binding region proteins domain identified by eMATRIX, accession number BL00107B, p-value=8.071e-11, raw score of 13.31
  DOMAIN (111)..(202): Eukaryotic protein kinase domain identified by PFam, accession name pkinase, E-value=2.6e-18, PFam score of 70.0
MVSLLIGELKSHQDLHTSHCAQCPCVPPIHPQMVQPSWCSPWFLWSASGVGFSQRFQTSGKNECPPPIPSYHPISHRSRKILCEWHYASLGKEVAQTETTFSLTSHGLSRSSPEVISAHDYSQQCDIWSIGVVMYMLLRGEPPFLASLKKKLFELIRKGELHFENAVWNSISDCAKSVLKQLMKVDPAHRITAKELLDNQWLTGNKLSSVRPTNVLEMMKEWKNNPESVEENTTEEKNKPSTEEKLKSYSTLGKCP

SEQ ID NO: 14401 - protein, 139 aa, Homo sapiens
  misc_feature (1)...(139): Xaa = X or * as defined in Table 2
IVSLFLFILLVFWWWCFFFFFFFETVLLFSPRLQCRDVTSAHCNFCFPGSSDSRASAFRVARITGAHHDTWLIFCIFSRDRVLSCWSGWSRTSDLRXSALPKCWDYRCEPPCRAXFFFFLYPLTIPTSLPAPHYPPSLW

SEQ ID NO: 14402 - protein, 114 aa, Homo sapiens
MDKSLLLELPILLCCFRALSGSLSMRNDAVIEIVQCRMCHLQFPGEKCSRGRGICTATTEEACMVGRMFKRDGNPWLTFMGCLKNCADVKGIRWSVYLVNFRCCRSHDLCNEDL

SEQ ID NO: 14403 - protein, 93 aa, Homo sapiens
YGPLNLLTFNVFYHNEHHDLPNIPGKSLPLVRKIAAEYYDNLPHYNSWIKVLYDFVMDDTISPYSRMKRRPPGRDGAGPNIIIALGILLQNFR

SEQ ID NO: 14404 - protein, 57 aa, Homo sapiens
RGLVGSPSSAPSAAPSWSSEKQGCRGHCGLGGSLVPHGRIHHSSNFPSCSGDPSQDS

SEQ ID NO: 14405 - protein, 105 aa, Homo sapiens
  DOMAIN (11)..(31): AROMATIC-L-AMINO-ACID DECARBOXYLASE SIGNATURE domain identified by eMATRIX, accession number PR00800A, p-value=9.757e- 16, raw score of 15.23
  DOMAIN (40)..(105): Pyridoxal-dependent decarboxylase conse domain identified by PFam, accession name pyridoxal_deC, E-value=3.5e-17, PFam score of 61.9
  misc_feature (1)...(105): Xaa = X or * as defined in Table 2
QSPDSMNAREFRRRGMEMVDYVAYYMEGIEGLLVYPDVXPGYLRALIPAAAPHXLDTCEDIISDAEKIIMPGLSHWHSPDLFVYFDSVSSYARMLEDMQCGALDC

SEQ ID NO: 14406 - protein, 103 aa, Homo sapiens
  misc_feature (1)...(103): Xaa = X or * as defined in Table 2
GWGGLLIARPPFKRGKSSGPVGHLKPRGVGGRRGXNVNLCPKSSNPQGGLGERPRELRDKATVSALANFTARKGCXLRGPEGGQPGPRGKLFPKGVPGVQGQP

SEQ ID NO: 14407 - protein, 56 aa, Homo sapiens
LYSQSSFHSLNVFATKFFTVAFVKLETIKMSISRGLGTLIRTVGNSVPEGGMRKTY

SEQ ID NO: 14408 - protein, 32 aa, Homo sapiens
LLFKVTVEYRPIIDKTLNEADCATVPPAIHSY

SEQ ID NO: 14409 - protein, 67 aa, Homo sapiens
VPIHEFDHSMPFRGHRKKPFGGHWGKHTLSYVDVSTGKVTVKCRPIIDKTVNEADCAHCPPQPIHSY

SEQ ID NO: 14410 - protein, 37 aa, Homo sapiens
PVGQTGLELLTSGDLTASASLNAGIPGMSHHAWLKLF

SEQ ID NO: 14411 - protein, 404 aa, Homo sapiens
  DOMAIN (169)..(184): BETA G-PROTEIN (TRANSDUCIN) SIGNATURE domain identified by eMATRIX, accession number PR00319B, p-value=2.857e-09, raw score of 11.47
  DOMAIN (143)..(321): WD domain, G-beta repeat domain identified by PFam, accession name WD40, E-value=8.6e-37, PFam score of 135.7
MEAGEEPLLLAELKPGRPHQFDWKSSCETWSVAFSPDGSWFAWSQGHCVVKLVPWPLEEQFIPKGFEAKSRSSKNDPKGRGSLKEKTLDCGQIVWGLAFSPWPSPPSRKLWARHHPQAPDVSCLILATGLNDGQIKIWEVQTGLLLLNLSGHQDVVRDLSFTPSGSLILVSASRDKTLRIWDLNKHGKQIQVLSGHLQWVYCCSISPDCSMLCSAAGEKSVFLWSMRSYTLIRKLEGHQSSVVSCDFSPDSALLVTASYDTSVIMWDPYTGERLRSLHHTQLEPTMDDSDVHMSSLRSVCFSPEGLYLATVADDRLLRIWALELKAPVAFAPMTNGLCCTFFPHGGIIATGTRDGHVQFWTAPRVLSSLKHLCRKALRSFLTTYQVLALPIPKKMKEFLTYRTF

SEQ ID NO: 14412 - protein, 136 aa, Homo sapiens
  DOMAIN (11)..(35): Serpins proteins domain identified by eMATRIX, accession number BL00284A, p-value=7.231e-17, raw score of 15.64
  DOMAIN (5)..(44): Serpins (serine protease inhibitors) domain identified by PFam, accession name serpin, E-value=1.5e-13, PFam score of 48.4
FRHEQASKDRNVVFSPYGVASVLAMLQLTTGGETQQQIQAAMGFKIDGEPRDTRGGGWHAEQTYQKPRKGWLWLSRAKPHTAVLQGPPHLLPTTLQVTGPLNLQGCLTSRFTAYSPPCDLNLVKFAHLQNEDYLLS

SEQ ID NO: 14413 - protein, 163 aa, Homo sapiens
  DOMAIN (97)..(121): Serpins proteins domain identified by eMATRIX, accession number BL00284A, p-value=9.836e-09, raw score of 15.64
  DOMAIN (71)..(162): Serpins (serine protease inhibitors) domain identified by PFam, accession name serpin, E-value=6e-16, PFam score of 56.6
GQERCQEDPHAPLQQTVIPSSVSRPPPERGANRQSQGTSENFRMQMSPALTCLVLGLALVFGEGSAVHHPPSYVAHLASHFGVRVFQQVAHASKDRSVGFSPYGEDSVLAMLQLTTGGETQQQIQAAMGYKIDGEPRDTRGDKGMAPALRHLYKELMGPWEQG

SEQ ID NO: 14414 - protein, 74 aa, Homo sapiens
FFFESHSVAQDGVQLCDLSLVQRPPPGFKQFSCLSLPSRWDYRHTSPHPANFCIFSRDGVLPYWSGWSRTPDLR

SEQ ID NO: 14415 - protein, 71 aa, Homo sapiens
  misc_feature (1)...(71): Xaa = X or * as defined in Table 2
DKWRRLPWKRGVEVGTAGSLAKAFGFFAEAKTEPREGCSESGVRISYQXVQQTNSKCLKYXMEPARPTFSP

SEQ ID NO: 14416 - protein, 130 aa, Homo sapiens
  misc_feature (1)...(130): Xaa = X or * as defined in Table 2
MCXXXXXXXXXXXXXXXXXXXXXXXXXXXXXXXXXXXXXXXXXXXXXXXXXXXXXXXXXXXXXXXXXXXXXXXXXXXXXXXXXXXXXXXXXXHNGISGFHYLENQEPTSQPCCFYKTELRKQSLAVVLAL

SEQ ID NO: 14417 - protein, 111 aa, Homo sapiens
  misc_feature (1)...(111): Xaa = X or * as defined in Table 2
SPFPKEVGGGKFLNLGGQRFWGPKFGPLFSAKTKKGTSFLKXGFKNPPAQGGKPPFFLKIQNXPTLGGGPLNPHFLRRLGGENFXTSEGKGFGDPNLALCSPPKQKKGLLF

SEQ ID NO: 14418 - protein, 58 aa, Homo sapiens
PPQPRVAGTTGVSRAPPVLIFVFFVDRRSHHVAQDGLELLGSSDLPTSASQSVHIVIS

SEQ ID NO: 14419 - protein, 53 aa, Homo sapiens
  misc_feature (1)...(53): Xaa = X or * as defined in Table 2
MNSVPGLAKSVGLLRTRYDSPKQPLLCSEAVVLICKDLSRGWQKPGTQGIGGX

SEQ ID NO: 14420 - protein, 286 aa, Homo sapiens
LYPAKLSGGWIAMPKYWRAPNCSNTGGRLGANNRPGSFYKFPLKDGPRLQAWLQHMGCEHWVPSCHQHLCSEHFTPSCFQWRWGVRYLRPDAVPSIFSRGPPAKSQRRTRSTQKPVSPPPPLQKNTPLPQSPVFPVSGPERLEVLGPTSGSPKTVATMLLTPLAPAPTPERSQPEVPAQQAQTGLGPVLGALQRRVQRLQWCQERHQAQLQALERLAQQLHGESLLARARRGLQRLTTAQTLGPEESQTFTIICGGPDIAMVLAQDPAPATVDAKPELLDTRIPSA

SEQ ID NO: 14421 - protein, 50 aa, Homo sapiens
HEGPLALGFHLAYITMRLFLALIITTIYHCEYHLPFLTSPECHDYHHIKQ

SEQ ID NO: 14422 - protein, 40 aa, Homo sapiens
TRVDPRVRKKTTMKIIPFNRLTIGEGQQHHLGGAKQAGDV

SEQ ID NO: 14423 - protein, 163 aa, Homo sapiens
  DOMAIN (77)..(107): Fibrinogen beta and gamma chains C-terminal domain proteins domain identified by eMATRIX, accession number BL00514G, p-value= 1.947e-37, raw score of 15.98
  DOMAIN (7)..(146): Fibrinogen beta and gamma chains, C-term domain identified by PFam, accession name fibrinogen_C, E-value=5.1e-74, PFam score of 257.8
NWKAGMGRPSTADYAMFKVVHEVDKYRFTYAYFAGGDAEDAFDGYDFGDDPSDKFFTSHNGMQFSTWDNDNDKFEGNCAEQDGSGWWMNKCHAGHLNGVYYQGGTYSKASTPNGYDNGIIWATWKTRWYSMKKTTMKIIPFNRLTIGEGQQHHLGGAKQAGDV

SEQ ID NO: 14424 - protein, 133 aa, Homo sapiens
  misc_feature (1)...(133): Xaa = X or * as defined in Table 2
VEMGFCQADQAGLELLTSGDPPASVSQSTGITVLSLSFFFETESRSVAQAGVQWRDLGSLQRPPPGSRHSPASASRVAGTTGARRHAWLIFLYFLVETGFHRVSQDGLDLLTSXSARLSLPKCWGYRREPSAR

SEQ ID NO: 14425 - protein, 64 aa, Homo sapiens
  misc_feature (1)...(64): Xaa = X or * as defined in Table 2
MGXXIFXPLXKTPPFFPGVWGKNFSPGPGXPXPPPRGGPPPLFFPQKKGXXPPPPFPKVLGLQA

SEQ ID NO: 14426 - protein, 226 aa, Homo sapiens
  misc_feature (1)...(226): Xaa = X or * as defined in Table 2
FFEMESRSVAQAGVQWRDLGSLQAPPPGFTPFSCLSLPRSWDYRRPPTLLANFFVFLVETGFHCVSQDSLDLLTLRSARLFFFFFETESRSVAQAGVQWRALGSLQAPPPGSRHSPASASQVAGTTGARHYARLIFVFLVETGFHRFSRDGLDLLTSXSARLGLPKCWDYRREPPRPAVRVYFYNRSVFIEYVQFCKLLFTFKINVRSQNILGSPNILKSLLKNLN

SEQ ID NO: 14427 - protein, 86 aa, Homo sapiens
  misc_feature (1)...(86): Xaa = X or * as defined in Table 2
FFFETESRSVAQAGVQWCHLGSLQPLPPGSSDSPASTSRVAGVTITATXVAGTTVVRHHAWLIFVFLVETGFHHVGQAGLEHLDLR

SEQ ID NO: 14428 - protein, 82 aa, Homo sapiens
  misc_feature (1)...(82): Xaa = X or * as defined in Table 2
FGTDRTAVQTSSSQRLCLPWVAQKTYWLLVPSSLLKDLKEKKEVVEEAXNGRDAPANGNAVSVCFAPEPWQLPPHKIFPVLL

SEQ ID NO: 14429 - protein, 75 aa, Homo sapiens
MLPRLVSNSWAQAILLPRPPEVLGMLSSYPNNSGLEMSTIWLIKVTLQNILIWGLSHPKEEKRFLFLRRSFACRP

SEQ ID NO: 14430 - protein, 95 aa, Homo sapiens
  DOMAIN (3)..(24): HERPSEVIRUS INTEGRAL MEMBRANE PROTEIN SIGNATURE domain identified by eMATRIX, accession number PR00333D, p-value=7.387e- 09, raw score of 16.30
FRRRFPLISLFFFFLFFFCFFFFETESRSVAQAGVQWRDLGSLQAPPPGFTPFALSPRLECSGAILAHCKLLLPGSSHSPASANRVAGTTGTRHH

SEQ ID NO: 14431 - protein, 95 aa, Homo sapiens
  misc_feature (1)...(95): Xaa = X or * as defined in Table 2
PQEFKTSPGNVARPQLYNFFFFFFETESRSVSQAGVQWCDLGSLQAPPPGSHHSPASASXVAGTTGAHHHARLLFVFLVETGFHCVSQDGLDLLT

SEQ ID NO: 14432 - protein, 145 aa, Homo sapiens
  misc_feature (1)...(145): Xaa = X or * as defined in Table 2
KGTRKRGQGIKVHLPIPILLFNLICFCTFGLFLVFLFLFPFFFFFFFEIESHSVAQDGVQWCNLGSLQPTPPGSSDSPASASXVAEITGTRHYAWLIFLFLVEMRFHHVGQAGLELTSGDPPASASQSAGIRVMSHRGLVFLYYK

SEQ ID NO: 14433 - protein, 104 aa, Homo sapiens
  misc_feature (1)...(104): Xaa = X or * as defined in Table 2
RFFSFFFFFETESHSVAQAGVQWCNLGSLQAPPPGSRHSPASASRVAGTTGAHHHARLIFVFLVETGFHRISQDGLDLLTSXSARLGIPKCWDYRCEPPHLASI

SEQ ID NO: 14434 - protein, 146 aa, Homo sapiens
  misc_feature (1)...(146): Xaa = X or * as defined in Table 2
FFFFFETESRSVAQAGVQWRALGSLQAPPPGSRHSPASASQVAGTTGARHYARLIFVFLVETGFHRFSRDGLDLLTSXSARLGLPKCWDYRREPPRPAVRVYFYNRSVFIEYVQFCKLLFTFKINVRSQNILGSPNILKSLLKNLN

SEQ ID NO: 14435 - protein, 73 aa, Homo sapiens
CETESRSVTQAGVQWSDLGSLQAPPPGSRHSPASASQVAGTTGAHHHARLIFVLLVETGFHRVSQDGLDLLTS

SEQ ID NO: 14436 - protein, 116 aa, Homo sapiens
  misc_feature (1)...(116): Xaa = X or * as defined in Table 2
KHFFFFFFFETESRSVAQAGVQWRDLGSLQAPPPGSRHSPASASRVAGTTGTRHRAWLIFVYFLVETVFHRVSQDGELXKLYRENSIENILVQKCLKVYFSHCSRSEITVTGNNLL

SEQ ID NO: 14437 - protein, 102 aa, Homo sapiens
FLFFETESCSVAQAGVQWHDLGSLQAPPPGSCHSPASASQVARTTGTRHHPRLIFFVFLVEMGFHHVSQDGLDLLTLGSGHLSLPKCWDYRCEPPHPSSPSY

SEQ ID NO: 14438 - protein, 101 aa, Homo sapiens
  misc_feature (1)...(101): Xaa = X or * as defined in Table 2
FFFFFETESRSVAQAGVQWRDLGSLQAPPPGSRHSPASASQVAGTTGARHYARLIFVVFLVETGFHRFSRDGLDLLTSXSARLGLPKCWDYRREPPRPAYF

SEQ ID NO: 14439 - protein, 131 aa, Homo sapiens
  misc_feature (1)...(131): Xaa = X or * as defined in Table 2
TLAFFLIPCIGSPACPTMSDAAVDTSSEITTKGLKRRRRKLWEEAENGKRRPCLTGNAENEGKWGSREADNEVHQKEEXCGEEQEEEEEGDGEEEDGDEDDETLSATVTRATEDEDDDAVAPTKQTTRLDE

SEQ ID NO: 14440 - protein, 29 aa, Homo sapiens
EMESRSVAQATVQWRDLGPLQAPPPRRKF

SEQ ID NO: 14441 - protein, 186 aa, Homo sapiens
  DOMAIN (104)..(114): Eukaryotic thiol (cysteine) proteases cysteine proteins domain identified by eMATRIX, accession number BL00139C, p-value= 9.308e-12, raw score of 9.23
  DOMAIN (1)..(126): Papain family cysteine protease domain identified by PFam, accession name Peptidase_C1, E-value=2.7e-51, PFam score of 183.8
  misc_feature (1)...(186): Xaa = X or * as defined in Table 2
MTNAFQYVQKNRGIDSEDAYPYVGQSYYNLVSSSQEESCMYNPTGKAAKCRGYREIPEGNEKALKRAVARVGPVSVAIDASLTSFQFYSKGVYYDESCNSDNLNHAVLAVGYGIQKGNKHWIIKNSQSAQTVLTPDECLLLGYLDKGKLKRKDKAGSLQWAYMAIARLGGFMDSMPTGIAIWGALX

SEQ ID NO: 14442 - protein, 111 aa, Homo sapiens
YIDVKTFFFFFLPETESHSVAQAGVQWHDLSSLQPLPPGSSDSPASASRVAGITGTHHHAWFIFVFLVGTRFHHLGQAGLELLTSSDPPASAPQSAGITGVNHHTQPQKFI

SEQ ID NO: 14443 - protein, 93 aa, Homo sapiens
HERFRVCAIRQGQDSLGHQDLGCPYSTTGLFISQRTEPPTTTNRYTVESTRTRRALSDKQSAAVILELGAFFYIMNAFIIQYFAFKRKYNSIL

SEQ ID NO: 14444 - protein, 58 aa, Homo sapiens
RQNSLRGSFHSAHVLKMDDFGAVPCTDLVVQSISPHQSKQSQPVELDPFGAAPFLYRQ

SEQ ID NO: 14445 - protein, 163 aa, Homo sapiens
KDPESFFKVLMHLKDLGLNFHVSVLGETFTDVPDIFSEAKKALGSSVLHWGYLPSKDDYFQVLCMADVVISTAKHEFFGVAMLEAVYCGCYPLCPKDLVYPEIFPAEYLYSTPEQLSKRLQNFCKRPDIIRKHLYKGEIAPFSWAALHGKFRSLLTTEPREDL

SEQ ID NO: 14446 - protein, 202 aa, Homo sapiens
  DOMAIN (122)..(164): Kringle domain proteins domain identified by eMATRIX, accession number BL00021D, p-value=1.188e-24, raw score of 24.56
  DOMAIN (5)..(163): Trypsin domain identified by PFam, accession name trypsin, E- value=7.8e-51, PFam score of 162.7
LQYQKVDKLFLHPKFDDWLLDNDIALLLLKSPLNLSVNRIPICTSEISDIQAWRNCWVTGWGITNTSEKGVQPTILQAVKVDLYRWDWCGYILSLLTKNMLCAGTQDPGKDACQGDSGGALVCNKKRNTAIWYQVGIVSWGMGCGKKNLPGVYTKVSHYVRWISKQTAKAGRPYMYEQNSACPLVLSCRAILVLYFGMFLLT

SEQ ID NO: 14447 - protein, 45 aa, Homo sapiens
SALGGAPPVPSRPGASPDPLGPPPQVPSGPNRAPPGVPRITISDP

SEQ ID NO: 14448 - protein, 877 aa, Homo sapiens
  DOMAIN (31)..(50): DYNAMIN SIGNATURE domain identified by eMATRIX, accession number PR00195A, p-value=5.364e-22, raw score of 11.94
  DOMAIN (216)..(509): Dynamin central region domain identified by PFam, accession name dynamin_2, E-value=1.3e-163, PFam score of 556.9
MGNRGMEDLIPLVNRLQDAFSAIGQNADLDLPQIAVVGGQSAGKSSVLENFVGRDFLPRGSGIVTRRPLVLQLVNATTEYAEFLHCKGKKFTDFEEVRLEIEAETDRVTGTNKGISPVPINLRVYSPHVLNLTLVDLPGMTKVPVGDQPPDIEFQIRDMLMQFVTKENCLILAVSPANSDLANSDALKVAKEVDPQGQRTIGVITKLDLMDEGTDARDVLENKLLPLRRGYIGVVNRSQKDIDGKKDITAALAAERKFFLSHPSYRHLADRMGTPYLQKVLNQQLTNHIRDTLPGLRNKLQSQLLSIEKEVEEYKNFRPDDPARKTKALLQMVQQFAVDFEKRIEGSGDQIDTYELSGGARINRIFHERFPFELVKMEFDEKELRREISYAIKNIHGIRTGLFTPDMAFETIVKKQVKKIREPCLKCVDMVISELISTVRQCTKKLQQYPRLREEMERIVTTHIREREGRTKEQVMLLIDIELAYMNTNHEDFIGFANAQQRSNQMNKKKTSGNQDEILVIRKGWLTINNIGIMKGGSKEYWFVLTAENLSWYKDDEEKEKKYMLSVDNLKLRDVEKGFMSSKHIFALFNTEQRNVYKDYRQLELACETQEEVDSWKASFLRAGVYPERVGDKEKASETEENGSDSFMHSMDPQLERQVETIRNLVDSYMAIVNKTVRDLMPKTIMHLMINNTKEFIFSELLANLYSCGDQNTLMEESAEQAQRRDEMLRMYHALKEALSIIGNINTTTVSTPMPPPVDDSWLQVQSVPAGRRSPTSSPTPQRRAPAVPPARPGSRGPAPGPPPAGSALGGAPPVPSRPGASPDPFGPPPQVPSRPNRAPPGVPRCSRRSTLLTANVSSDSSGYLAPRSMVRCEICD

SEQ ID NO: 14449 - protein, 36 aa, Homo sapiens
DIKAHTQPVTKAPGPGETKIPVTLSRVQNVQPLLAT

SEQ ID NO: 14450 - protein, 499 aa, Homo sapiens
  DOMAIN (169)..(187): TROPOMYOSIN SIGNATURE domain identified by eMATRIX, accession number PR00194A, p-value=7.652e-09, raw score of 7.86
  DOMAIN (186)..(334): Putative snoRNA binding domain identified by PFam, accession name Nop, E-value=6.1e-57, PFam score of 202.6
MSLADELLADLEEAAEEEEGGSYGEEEEEPAIEDVQEETQLDLSGDSVKTIAKLWDSKMFAEIMMKIEEYISKQAKASEVMGPVEAAPEYRVIVDANNLTVEIENELNIIHKFIRDKYSKRFPELESLVPNALDYIRTVKELGNSLDKCKNNENLQQILTNATIMVVSVTASTTQGQQLSEEELERLEEACDMALELNASKHRIYEYVESRMSFIAPNLSIIIGASTAAKIMGVAGGLTNLSKVPACNIMLLGAQRKTLSGFSSTSVLPHTGYIYHSDIVQSLPPDLRRKAARLVAAKCTLAARVDSFHESTEGKVGYELKDEIERKFDKWQEPPPVKQVKPLPAPLDGQRKKRGGRRYRKMKERLGLTEIRKQANRMSFGEIEEDAYQEDLGFSLGHLGKSGSGRVRQTQVNEATKARISKTLQRTLQKQSVVYGGKSTIRDRSSGTASSVAFTPLQGLEIVNPQAAEKKVAEANQKYFSSMAEFLKVKGEKSGLMST

SEQ ID NO: 14451 - protein, 59 aa, Homo sapiens
  misc_feature (1)...(59): Xaa = X or * as defined in Table 2
AYNLSDGQYGLVDPEFEYYFWLCCWLPLXLGGKCLWVLPVSVSGDRNDNDQAERNGSHL

SEQ ID NO: 14452 - protein, 631 aa, Homo sapiens
RSFLDEEFPHYDSLSCADAIQQPLQEKLKQCCHKLYGGQEARIHQTPLTLKHTCWYTPLLDALSLDSFTAVPTLESTPFSGVANQIHTLCERPTYGEVKDGALDVKRQHKCPGPTSGPSPGTNLSGCIRMNDDPSMEENGVERVCPESLLQSRGYSSLPLPRHTSSTDGTITSSDPGLEILNMASCDLDRNSLCKKEEDTRSASPTIEAQGTSPAHDNIAFQDSTSKDKTILNLEAKEEPETIEEHKKEHASGDSVVSPLPVTTVKSVNVRQSENTSANEKEVEAEFLRLSLGFKCDWFTLEKRVKLEERSRDWAEENLKKEITNSLKLLESLTPLCEDDNQAQEIIKKLEKSIKFLSQCAARVASRAEMLGAINQESRVSKAVEVMIQHVENLKRMYAKEHAELEELKQVLLQNERSFNPLEDDDDCQIKKRSASLNSKPSSLRRVTMALLFLPRNYLGNAGMVAGMENNDRFSRRSSSWRILGSKQSEHRPSLPRFISTYSWADAEEEKCELKTKDDSEPSGEETVERTRKPSLSEKKNNPSKWDVSSVYDTIASWATNLKSSIRKANKALWLSIAFIVLFAALMSFLTGQLFQKSVDAAPTQQEDSWTSLEHILWPFTRLRHNGPPPV

SEQ ID NO: 14453 - protein, 278 aa, Homo sapiens
MRYHFTPTRMAMVKEERKLSTISSVHIPTINLTEESRVSKAVEVMIQHVENLKRMYAKEHAELEELKQVLLQNERSFNPLEDDVKMSTDITDSTLGSFEALGGETSKGVLEVSDLIAYVADLHFNKRKLEEENNKFKLALETLEETNSQLSEDCTELRLQVKSAHQAIMRTNLLKEELEELKLSMNASEEQKSMIVAQSKQLETENRALILKIRILQEENFKNIMDIDRLEKKIEDLSKTETEHQVSTSQILMQLHTYENTLLNKDTSLQKKWDPVEC

SEQ ID NO: 14454 - protein, 1245 aa, Homo sapiens
  DOMAIN (1130)..(1156): C2 domain proteins domain identified by eMATRIX, accession number PF00168C, p-value=1.643e-15, raw score of 27.49
  DOMAIN (993)..(1191): C2 domain identified by PFam, accession name C2, E-value=4.7e -59, PFam score of 209.6
MMCRGTVFQAGGTAGAKALSPYPDEDGGDGGLGTGAAPGPRLRHSKSIDEGMFSAEPYLRLESAGSGAGYGGYGAGSRAYGGGGGSSAFTSFLPPRPLALDPASPLGLALAARERALKESSEGGGAPQPPPRPPSPRYEAPPPTPHHHSPHAHHEPVLRLWGASPPDPARRELGYRAGLGSQEKSLPASPPAARRSLLHRLPPTAPGVGPLLLQLGTEPPAPHPGVSKPWRSAAPEEPERLPLHVRFLENCQPRAPVTSGRGPPSEDGPGVPPPSPRREENGLPLLVLPPPAPSVDVEDGEFLFVEPLPPPLEFSNSFEKPESPLTPGPPHPLPDTPAPATPLPPVPPPAVAAAPPTLDSTASSLTSYDSEVATLTQGASAAPGDPHPPGPPAPAAPAPAAPQPGPDPPPGTDSGIEEVDSRSSSDHPLETISSASTLSSLSAEGGGSAGGGGGAGAGVASGPELLDTYVAYLDGQAFGGSSTPGPPYPPQLMTPSKLRGRALGASGGLRPGPSGGLRDPVTPTSPTVSVTGAGTDGLLALRACSGPPTAGVAGGPVAVEPEVPPVPLPTASSLPRKLLPWEEGPGPPPPPLPGPLAQPQASALATVKASIISELSSKLQQFGGSSAAGGALPWARGGSGGGGDSHHGGASYVPERTSSLQRQRLSDDSQSSLLSKPVSSLFQNWPKPPLPPLPTGTGVSPTAAAAPGATSPSASSSSTSTRHLQGVEFEMRPPLLRRAPSPSLLPASEHKVSPAPRPSSLPILPSGPLYPGLFDIRGSPTGGAGGSADPFAPVFVPPHPGISGGLGGALSGASRSLSPTRLLSLPPDKPFGAKPLGFWTKFDVADWLEWLGLAEHRAQFLDHEIDGSHLPALTKEDYVDLGVTRVGHRMNIDRALKFFLERYPALPRPLTQQTLTSQPDPSSEERPPALPLPLPGGEEKAKLIGQIKPELYQGTGPGGRRSGGGPGSGEAGTGAPCGRISFALRYLYGSDQLVVRILQALDLPAKDSNGFSDPYVKIYLLPDRKKKFQTKLAQRKLHFSVYDFDRFSRHDLIGQVVLDNLLELAEQPPDRPLWRDIVEGGSEKADLGELNFSLCYLPTAGRLTVTIIKASNLKAMDLTGFSDPYVKASLISEGRRLKKRKTSIKKNTLNPTYNEALVFDVAPESVENVGLSIAVVDYDCIGHNEVIGVCRVGPDAADPHGREHWAEMLANPRKPVEHWHQLVEEKTVTSFTKGSKGLSEKENSE

SEQ ID NO: 14455 - protein, 386 aa, Homo sapiens
  DOMAIN (331)..(345): C2H2-TYPE ZINC FINGER SIGNATURE domain identified by eMATRIX, accession number PR00048A, p-value=4.316e-11, raw score of 10.52
  DOMAIN (196)..(354): Zinc finger, C2H2 type domain identified by PFam, accession name zf-C2H2, E-value=1.3e-11, PFam score of 52.1
ECVRLKPTDIQPDIFSYLLHLMYTGKMAPQLIDPVRLEQGIKFLHAYPLIQEASLASQGAFSHPDQVFPLASSLYGIQIADHQLRQATKIASAPEKLGRDPRPQTSRISQEQVPEASQLSQLTSNLAQVNRTNMTPSDPLQTSLSPELVSTPVPPPPPGEETNLEASSSYEQPASLTIAHVKPSIMKRNGSFPKYYACHLCGRRFTLRSSLREHLQIHTGVPFTSSQQGESRVPLTLCSNAADLGKDAMEVPEAGMISDSELQHISDSPIIDGQQQSETPPPSDIADIDNLEQADQEREVKRRKYECTICGRKFIQKSHWREHMYIHTGKPFKCSTCDKSFCRANQAARHVCLNQSIDTYTMVDKQTLELCTFEEGSQMDNTAAAH

SEQ ID NO: 14456 - protein, 148 aa, Homo sapiens
NFSSNKWNTSQNFANMDNSAQKNERTGKHPRRASEVQKNDIPGPGFYNVIHQSPVSNSVSLSKKGTCMFPSMCARLDTIVSKYPAANAYTIPSDFISKRDFSNSCSSMFQLPSFMKALKFETPLAPNYYNASVSCCKRRNNVCTRAGF

SEQ ID NO: 14457 - protein, 420 aa, Homo sapiens
MDNSAQKNERTGKHPRRASEVQKALRICIHNTRVLLGSRPGVLEYLAPQCLLLPASLSMAVSSSSVHRGSFSPKAGISTPVVTSHGARNDIPGPGFYNVIHQSPVSNSVSLSKKGTCMFPSMCARLDTIISKYPAANAYTIPSDFISKRDFSNSCSSMFQLPSFMKALKFETPAPNYYNASVSCCKQRNNVCTRAGFMSKTQRGSFAFADKGPPPEVTSSSSHKTEEAALFPEHPLHGHYDINESLVKQSPNTLMSCFKSKTNRGLKLTSTGPGPGYYNPSDCTKVPKKTLFPKNPILNFSAQPSPLPPKPPFPGPGQYEIVDYLGPRKHFISSASFVSNTSRWTAAPPQPGLPGPDWWHPESVQPRSMEEEFEWLPWLGAMGPKEKRILSSSTGGRNDQGKRPQQAGGRLCGQLPVTHH

SEQ ID NO: 14458 - protein, 40 aa, Homo sapiens
KKDKIMFLAGTWMDLKAIILSKLMQEQKTKYCMFSLISGS

SEQ ID NO: 14459 - protein, 134 aa, Homo sapiens
  DOMAIN (59)..(94): Prion protein domain identified by eMATRIX, accession number BL00291A, p-value=5.663e-10, raw score of 4.49
GGGSAAGSRDSGVWSGGESGGGSGGWSGGGSGGDSGGGSGGGSGGDSGGGSGGWGGGWNGGWSGGGSGGGSGGWSGGGSGGWSGGESGGWSGGDSGGWSGGWSGGGSGGWARQQHVLSVTVPMENGNSRSELTP

SEQ ID NO: 14460 - protein, 201 aa, Homo sapiens
  DOMAIN (59)..(94): Prion protein domain identified by eMATRIX, accession number BL00291A, p-value=5.663e-10, raw score of 4.49
GGGSAAGSRDSGVWSGGESGGGSGGWSGGGSGGDSGGGSGGGSGGDSGGGSGGWGGGWNGGWSGGGSGGGSGGWSGGGSGGWSGGESGGWSGGDSGGWSGGWSGGGSGGWGNVHQPSPASPGPPALQRCWTGTHPRQRRQFWPLCSLRVAPSRPAAPAPQRPPQGACRAASLTGSKDVPGCPHHVAGGPASFPLSAGSSCR

SEQ ID NO: 14461 - protein, 1230 aa, Homo sapiens
  DOMAIN (592)..(609): Transaldolase proteins domain identified by eMATRIX, accession number BL01054F, p-value=9.591e-09, raw score of 12.99
  DOMAIN (208)..(423): Putative snoRNA binding domain identified by PFam, accession name Nop, E-value=1.7e-32, PFam score of 121.4
NSERRGLGMSLADELLADLEEAAEEEEGGSYGEEEEEPAIEDVQEETQLDLSGDSVKTIAKLWDSKMFAEIMMKIEEYISKQAKASEVMGPVEAAPEYRVIVDANNLTVEIENELNIIHKFIRDKYSKRFPELESLVPNALDYIRTVKVSAEKELGNSLDKVARAIEEPWQQILTNATIMVVSVTASTPQGQQLSEEELERLEEACDMALELNASKHRIYEYVESRMSFIAPNLSIIIGASTAAKIMGQLPSLSEPPLHLPLAEWARSPAWQGHRGIQPELHVKVPSTRRAPRQIYSPHSLLSSDRPLPPSLPRRCGGGLTNLSKMPACNIMLLGAQRKTLSGFSSTSVLPHTGYIYHSDIVQSLPPDLRRKAARLVAAKCTLAARVDSFHESTEGKVGYELKDEIERKFDKWQEPPPVKQVKPLPAPLDGQRKKRGGRRDEKRGGEASSAAAILDRARSASAEPSADAAASLEPRPPSSEQPRAQSNKPTIRHTRRYRDSARARGARKRRRALASPACRDTLLSGGASSCARGSRRGAAPSLSPSRSCASFTFLSASRGSFREPGAPGPARRRLPAWHRVGPPGEIDRCLKKVSEGVEQFEDIWQKLHNAANANQKEKYEADLKKEIKKLQRLRDQIKTWVASNEIKDKRQLIDNRKLIETQMERFKVVERETKTKAYSKEGLGLAQKVDPAQKEKEEVGQWLTNTIDTLNMQVDQFESEVESLSVQTRKKKGDKDDARVQTSRLFLSKDPGSPSPNPQPDARVLASNLLVCQIQQSKPLTFSSLRMTPVHKRVLSDSLLSRIGPQRDVSHFLLAAYRSLRLVPGLGMSLADELLADLEEAAEEEEGGSYGEEEEEPAIEDVQEETQLDLSGDSVKTIAKLWDSKMFAEIMMKIEEYISKQAKASEGETESLTPFKTPGRSSLPPLEALRRLCLLPLPDPTGHKMMWSNFFLQEENRRRGAAGRRRAHGQGRSGLTPEREGKVKLALLLAAAPCAKRPHLGLWKACTKRLWQADVPVDRDTCGPAELPGEANCTYFKFFTTGENARIFQRTTKKEVNLAAAVIAVLGLAVMALGCLCIIMVLSKGAEFLLRVGAVCFGLSGLLLLVSLEVFRHSVRALLQRVSPEPPPAPRLTYEYSWSLGCGVGAGLILLLGAGCFLLLTLPSWPWGGGTGPPRATLPPGTTSSNYSLGNFVRLGLAAVIVVIMGAFLVEAWYSRNVSPGESEAFKPE

SEQ ID NO: 14462 - protein, 70 aa, Homo sapiens
DTPACTRLFDAAYFGQKDSVCGVSECIIMGIPMNIGTGLFKLLHKADRDPNPPKRPLIFDTNEFHIPLVT

SEQ ID NO: 14463 - protein, 29 aa, Homo sapiens
HCGGTLELSDDDTDSKTSDVNETQPPQSE

SEQ ID NO: 14464 - protein, 38 aa, Homo sapiens
  DOMAIN (5)..(38): Actin domain identified by PFam, accession name actin, E- value=7.8e-22, PFam score of 72.9
PTRPGGSILASLSTFQQMWISRQEYDESGPSIVHRKCF

SEQ ID NO: 14465 - protein, 423 aa, Homo sapiens
  DOMAIN (54)..(89): Actins proteins domain identified by eMATRIX, accession number BL00406A, p-value=1.000e-40, raw score of 9.95
  DOMAIN (47)..(423): Actin domain identified by PFam, accession name actin, E- value=9e-259, PFam score of 850.4
MGDTPRQFGGARPRSGGALRGCRSRGGGNRRGLCLSRALANGDRRLTMDDDIAALVVDNGSGMCKAGFAGDDAPRAVFPSIVGRPRHQGVMVGMGQKDSYVGDEAQSKRGILTLKYPIEHGIVTNWDDMEKIWHHTFYNELRVAPEEHPVLLTEAPLNPKANREKMTQIMFETFNTPAMYVAIQAVLSLYASGRTTGIVMDSGDGVTHTVPIYEGYALPHAILRLDLAGRDLTDYLMKILTERGYSFTTTAEREIVRDIKEKLCYVALDFEQEMATAASSSSLEKSYELPDGQVITIGNERFRCPEALFQPSFLGMESCGIHETTFNSIMKCDVDIRKDLYANTVLSGRTPPCTLGIADRMQKEITALAPSTMKIKIIAPPERKYSVWIGGSILASLSTFQQMWISKQEYDESGPSIVHRKCF

SEQ ID NO: 14466 - protein, 37 aa, Homo sapiens
RLLVSSNSPTSASRNAEITDISHHTQLFNILLSISFT

SEQ ID NO: 14467 - protein, 50 aa, Homo sapiens
PSCEVQPSRLLMEPSGPYLSIIMPLIARFDHVVIHSSAFKFAVMVEILAC

SEQ ID NO: 14468 - protein, 84 aa, Homo sapiens
HRCFREEKEKALDPEAACPIPAPASLTGVRPQRTALSQDGVEDRKPDIPVPYLYFDMGAAVLCASFMSFGVKRRWFALGAALQL

SEQ ID NO: 14469 - protein, 117 aa, Homo sapiens
SFPSNLDAYKHHWLQMCWSPWWRYPITVFSPATSTFLLHQHIKIFTLHVEKALNDSSTELVLVSDEFAHLRTIVLQNQMALKMLTAPQGGACTLLQTECCVYISGNSHNMTLLGKPC

SEQ ID NO: 14470 - protein, 73 aa, Homo sapiens
ETEHRSFSQAGVQWCYLGSLQPPPPGFKLFSCLSLPSSWDYRCLPPCSANFCIFSKDGVSPCWSGWPRTPDLR

SEQ ID NO: 14471 - protein, 101 aa, Homo sapiens
  misc_feature (1)...(101): Xaa = X or * as defined in Table 2
MDAGLEAMQKYGKAAPGDRTMLDSLWAAGQELQAWKSPGADLLQVLTKAVKSAEAAAEATKNMEAGAGRASYISSARLEQPDPGAXAAAAILRAILEVLQS

SEQ ID NO: 14472 - protein, 37 aa, Homo sapiens
  misc_feature (1)...(37): Xaa = X or * as defined in Table 2
HKRPLMASYLLFFCSFVRVEXTIITCLTXXECHRYNR

SEQ ID NO: 14473 - protein, 767 aa, Homo sapiens
  DOMAIN (83)..(99): SYNAPTOTAGMIN SIGNATURE domain identified by eMATRIX, accession number PR00399A, p-value=1.730e-13, raw score of 9.52
  DOMAIN (96)..(167): C2 domain identified by PFam, accession name C2, E-value= 0.0033, PFam score of 21.0
RRAEGIPVEMVVIGDDSAFTVLKKAGRRGLCGTVLIHKVAGALAEAGVGLEEIAKQVNVVTKAMGSEEDEAHEGCSRENLGRIQFSVGYNFQESTLTVKIMKAQELPAKDFSGTSDPFVKIYLLPDKKHKLETKEVDQASLEDEGVEEHEENDDDVEEDCNILDAVDIKKSTTNEGLCEDPRAVGTLLIVKNYTGDRLNFGLAREQARAEGIPVEMVVIGDDSAFTVLKKAGRRGLCGTVLIHKAPVEKADKMYEQMRNSSRVGNSKSQMEMLKTNTVADMQNGFNRPIMRFDIIKERISGRQWTTDQQLIQVIRSIGVYDVVELKFAENRANGQSKGYAEVVVASENSVHKLLELLPGKVLNGEKVDVRPATRQNLSQFEAQARKLLPVPKGGTARGSWSNGRRTGCGEGQRARNGVGSLRASSEDTGAPPPPAHGRIRHIRRRRDFPETPKRALSSGSCGRWRKEARRCSGGGASFGWRPRASGVLQEASVALEYRRAAPSLDMSYNYVVTAQKPTAVNGCVTGHFTSAVDVYLLIVTNTRLEIYVVTPSGFRRQRVCLPSRAHVACLGLPSASPLGIPACHRCMCVVTAAVVGLTVASAILSLPLWMSVGLMCMLPAGGKAVNTAPVPGQTPHDESDRRTEPRSSVSDLVNSLTSEMLMPTQCEDNKDEDFYDDPLPLNEYSGVSEGDLGGLSAFNRSGRYFENIPKGLDQEGWTRGGIQPQMPGGYALSQPVSCHGGHPQPHGEPAAPASPRGKGNTPAQLLS

SEQ ID NO: 14474 - protein, 59 aa, Homo sapiens
VCVCVCVCVCVCVCSVPTRICLGAHCIFLCYGVVYIKHDRTRDNTISHRSPLGSALKEE

SEQ ID NO: 14475 - protein, 117 aa, Homo sapiens
SGGAVGTARSPALGMALLVLGLVSCTFFLAVNGLYSSSDDVIELTPSNFNREVIQSESHNRGFRPFSFLGSQWIFPAVKGHSLHSDDSTSGPFNQEVVLDWSFENTATVNFCISRKH

SEQ ID NO: 14476 - protein, 471 aa, Homo sapiens
  DOMAIN (213)..(226): Thioredoxin family proteins domain identified by eMATRIX, accession number BL00194, p-value=4.857e-16, raw score of 12.16
  DOMAIN (55)..(301): Thioredoxin domain identified by PFam, accession name thiored, E-value=1.1e-105, PFam score of 354.6
NSGVGAGARRAARCRAEAAAAVGTARSPALGMALLVLGLVSCTFFLAVNGLYSSSDDVIELTPSNFNREVIQSDSLWLVEFYAPWCGHCQRLTPEWKKAATALKDVVKVGAVDADKHHSLGGQYGVQGFPTIKIFGSNKNRPEDYQGGRTGEAIVDAALSALRQLVKDRLGGRSGGYSSGKQGRSDSSSKKDVIELTDDSFDKNVLDSEDVWMVEFYAPWCGHCKNLEPEWAAAASEVKEQTKGKVKLAAVDATVNQVLASRYGIRGFPTIKIFQKGESPVDYDGGRTRSDIVSRALDLFSDNAPPPELLEIINEDIAKRTCEEHQLCVVAVLPHILDTGAAGRNSYLEVLLKLADKYKKKMWGWLWTEAGAQSELETALGIGGFGYPAMAAINARKMKFALLKGSFSEQGINEFLRELSFGRGSTAPVGGGGFPTIVEREPWDGRDGELPVEDDIDLSDVELDDLGKDEL

SEQ ID NO: 14477 - protein, 144 aa, Homo sapiens
CPQGVSEECSAAREKKCLCINKVGRLLFLKLFILLHQQSIVNVCVCFGHFSLRELSFGRGSTAPVGGGAFPTIVEREPWDGRDGEVSAREDSCAGQQILVYSLEPVHLCTWESSPSHQTSALGAPVGLFKRFFSEDPSSSLSQV

SEQ ID NO: 14478 - protein, 425 aa, Homo sapiens
  DOMAIN (163)..(176): Thioredoxin family proteins domain identified by eMATRIX, accession number BL00194, p-value=4.857e-16, raw score of 12.16
  DOMAIN (5)..(253): Thioredoxin domain identified by PFam, accession name thiored, E-value=2e-98, PFam score of 330.6
  misc_feature (1)...(425): Xaa = X or * as defined in Table 2
LYSSSDDVIELTPSNFNREVIQSDSLWLVEFYAPWCGHCQRLTPEWKKAATALKDVVKVGAVDADKHHSLGGQYGVQGFPTIKIFGSNKNRPEDYQGGRTGEAIVDAALSALRQLVKDRLGGRSGGYSSGKQGRSDSSSKKDVIELTDDSFDKNVLDSEDVWMVEFYAPWCGHCKNLEPEWAAAASEVKEQTKGRVKLAAVDATVNQVLASRYGIRGFPTIKIFQKGESPVDYDGGRTRSDIVSRALDLFSDNAPPPELLEIINEDIAKRTCEEHQLCVVAVLPHILDTGAAGRNSYLEVLLKLADKYKKKMWGWLWTEAGAQSELETALGIGGFGYPAMAAINARKMKFALLKGSFSEQGINEFLRELSFGGGSNGTLXGGGGFSLPIVEREPWDGQGCRGFPWGDDHXPSVDAELDDLGKDEL

SEQ ID NO: 14479 - protein, 61 aa, Homo sapiens
  misc_feature (1)...(61): Xaa = X or * as defined in Table 2
ILFPGSGQGLRSSDQKAAKLALLXFQKRSEMYKTKXFWGRKMSQFFFSVVRHTNPGSRLWA

SEQ ID NO: 14480 - protein, 128 aa, Homo sapiens
RQSLFSIIQAGMHWHQLVSLQLLPPRFKRFSCLSLPSSWDCRCVPPCPANFGIFSRDGVSAMLARLVLNSWASCDLPTLASQSAGMTGVSHCTQSEFFFILIALTALIVLHQGKPYTNSVRHRLGNFC

SEQ ID NO: 14481 - protein, 60 aa, Homo sapiens
NIIITHKFMVKELICCLVLLLLTTVLYRIYHGLLTAEKGTVEFSHTKDYTGNRLLLLNVP

SEQ ID NO: 14482 - protein, 26 aa, Homo sapiens
WCDLGSLQPPPPRFKQFSCLSLPRHS

SEQ ID NO: 14483 - protein, 37 aa, Homo sapiens
  misc_feature (1)...(37): Xaa = X or * as defined in Table 2
APGPCPNQTLARDSGWVGXKNHQLCTCVCVCVCVCVC

SEQ ID NO: 14484 - protein, 98 aa, Homo sapiens
LPRLDGVQWCDLGSLQPLPPRFKQFSCLSLPSSWDYRHAPPRPANFVFLVEMGFLHVGQAGLELLTSGDPPASASQSAGITSVSHRARPLLHILNQPR

SEQ ID NO: 14485 - protein, 56 aa, Homo sapiens
  misc_feature (1)...(56): Xaa = X or * as defined in Table 2
XDVVVPVANCGVQEYNSNPKEHVTLRDYITYWKEYIQAGYSSPRGCLYLKDWHLCS

SEQ ID NO: 14486 - protein, 56 aa, Homo sapiens
  misc_feature (1)...(56): Xaa = X or * as defined in Table 2
XDVVVPVANCGVQEYNSNPKEHMTLRDYITYWKEYIQAGYSSPRGCLYLKDWHLCS

SEQ ID NO: 14487 - protein, 154 aa, Homo sapiens
  misc_feature (1)...(154): Xaa = X or * as defined in Table 2
QVVEVGPPRGRHPSAAGCPSPAXRRWKTRRAGWAARSPAQSRRRRRRPAPRRRLPGPEPGRRRGHRPPGLGSGCRRGRASRGPSSSARVEGPSSSLPPERKRXGPASEPEDAGRRVSAPPAPGARACTHARGSPRSSLRRRRAAEAARSALGLV

SEQ ID NO: 14488 - protein, 86 aa, Homo sapiens
  misc_feature (1)...(86): Xaa = X or * as defined in Table 2
VFFFFFFFLRRSLALLPRLECSGTIVFLVETGFTMLARMVSISXPRDLPALASQSAGITGVSHRARPASFNFLTINILPPLLLWTF

SEQ ID NO: 14489 - protein, 109 aa, Homo sapiens; identical to SEQ ID NO: 10262
  misc_feature (1)...(109): Xaa = X or * as defined in Table 2

SEQ ID NO: 14490 - protein, 130 aa, Homo sapiens
  misc_feature (1)...(130): Xaa = X or * as defined in Table 2
HISQHDRSYLQVLLASYKTASFLFFFLRQSLDSVTQAGVQWRDLGSLQAPPPGFTPFSCPQSPKXLSSWDYRRPPPRPANFFCIFIVEKECFTLLARMVSISWPRDLPASASQSAGITGMSHRARPAQVS

SEQ ID NO: 14491 - protein, 137 aa, Homo sapiens
  DOMAIN (73)..(88): WILM'S TUMOUR PROTEIN SIGNATURE domain identified by eMATRIX, accession number PR00049D, p-value=9.857e-10, raw score of 0.00
  misc_feature (1)...(137): Xaa = X or * as defined in Table 2
TRMGLPDASRRRTCRMDPEGWQEAMSSAXGRITLQRLSTGPEGQGGREKVGPEGGSENPQQPKAAGVLSKHLPGAPAQPPQRPPSSPPPLAGPLTERVEKVCDFLDAAGDYLNGTPGXPSPGESPAAQDPPVPPWPP

SEQ ID NO: 14492 - protein, 143 aa, Homo sapiens
  DOMAIN (72)..(100): !!!! PROTEIN ALU SUBFAMILY WARNING ENTRY NUCLEAR PHOSPHO domain identified by eMATRIX, accession number PD02454B, p-value= 5.091e-11, raw score of 11.61
  misc_feature (1)...(143): Xaa = X or * as defined in Table 2
SQPRFSWTQERLRLFPGMLLNSLIVSQATQGPLKSCLGSCLMAFTFKKMEPSPMSCSPQCFGKPMMGRLSGGQKFKNQAGQYHKTPSLRKSKKLASHGGVHLWSXLLRRLRQEDCLILGIRGCSELXLHLCTPPSATQRDPLS

SEQ ID NO: 14493 - protein, 59 aa, Homo sapiens
TFFPHTTPPPPELPDPKRPNTFEKKGKHENKAPGCSLKEEKEGAERPAGALSPCGPNVV

SEQ ID NO: 14494 - protein, 262 aa, Homo sapiens
  DOMAIN (182)..(229): Intermediate filaments proteins domain identified by eMATRIX, accession number BL00226D, p-value=6.023e-26, raw score of 19.10
  DOMAIN (5)..(229): Intermediate filament proteins domain identified by PFam, accession name filament, E-value=6e-69, PFam score of 242.5
  misc_feature (1)...(262): Xaa = X or * as defined in Table 2
IQHPRLSADDFRVNCETEPAMXHAVENDIHGLCELQLETEIQAFKEELLFMKKNHEEEVKGLQAQIASSGLTVVVDAPISQDFAKIMADIWAQYDEVAQKNREELDNNRSQQIEESTTVVTTQSTEVGAAKAMLTELTRTVQFLEINLDSMRNLKASLENSLREVVARYALQMEQLNGILLHLESELAQTWAEGQCQAQEYQALLNIKVKLEAAIATYRRLLEDGKDFNLGDTLDCSNSMQTIQKTTTRRXTRQIVDGKVVS

SEQ ID NO: 14495 - protein, 262 aa, Homo sapiens; identical to SEQ ID NO: 14494
  DOMAIN (182)..(229): Intermediate filaments proteins domain identified by eMATRIX, accession number BL00226D, p-value=6.023e-26, raw score of 19.10
  DOMAIN (5)..(229): Intermediate filament proteins domain identified by PFam, accession name filament, E-value=6e-69, PFam score of 242.5
  misc_feature (1)...(262): Xaa = X or * as defined in Table 2

SEQ ID NO: 14496 - protein, 71 aa, Homo sapiens
  misc_feature (1)...(71): Xaa = X or * as defined in Table 2
KYYRKRGIHSAIDASQTPDVVFASILAAFSXATCKDLVMFIXCWVQEGISFHPCEAMGGNDRTGKEKLPSG

SEQ ID NO: 14497 - protein, 438 aa, Homo sapiens
  DOMAIN (361)..(408): Intermediate filaments proteins domain identified by eMATRIX, accession number BL00226D, p-value=9.710e-33, raw score of 19.10
  DOMAIN (94)..(417): Intermediate filament proteins domain identified by PFam, accession name filament, E-value=1.8e-124, PFam score of 426.9
  misc_feature (1)...(438): Xaa = X or * as defined in Table 2
RPQSLSPVLSLSPDSMSFTTRSTFSTNYRSLGSVQAPSYGARPVSSAASVYAGAGGSGSRISVSRSTSFRGGMGSGGLATGIAGGLAGMGGIQNEKETMQSLNDRLASYLDRVRSLETENRRLESKIREHLEKKGPQVRDWSHYFKIIEDLRAQIFANTVDNARIVLQIDNARLAADDFRVKYETELAMRQSVENDIHGLRKVIDDTNITRLQLETEIEALKEELLFMKKNHEEEVKGLQAQIASSGLTVEVDAPKSQDLAKIMADIRAQYDELARKNREELDKYWSQQIEESTTVVTTQSAEVGAAETTLTELRRTVQSLEIDLDSMRNLKASLENSLREVEARRTPLQMEQLNGILLHLESELAQTRAEGQRQAQEYEALLNIKVKLEAEIATYRRLLEDGEDFNFGDALDSSNSMQTIQKTTTPPGXVGLGKVVS

SEQ ID NO: 14498 - protein, 114 aa, Homo sapiens
  misc_feature (1)...(114): Xaa = X or * as defined in Table 2
FFFFFFETESRSVAQAGVQWRDLSSLQAPPPGSRHSLASASXVAGTTGVCHHARLIFVFLVETGFHHVSQDGLNLLTSXSAGLGLPKCWDSEKLFFFFGDKSFRFCCPGWSTMV

SEQ ID NO: 14499 - protein, 70 aa, Homo sapiens
  misc_feature (1)...(70): Xaa = X or * as defined in Table 2
RREPLHPANLLLFFFFFFEMESPSVAQAGVQWRDLSSLQAPPPGSCHSPTSLSXVAGRLRNKNCLNPDAW

SEQ ID NO: 14500 - protein, 101 aa, Homo sapiens
  misc_feature (1)...(101): Xaa = X or * as defined in Table 2
FSVLFYFFESESCSVLQAGVQWRDLGSLQPPPPGSSHSPTSASXVAGTTGTCHHTQLIFIFLVETGFHHIGQASLKLLTSXFAHLGLPKFWDYRCEPPHPA

SEQ ID NO: 14501 - protein, 136 aa, Homo sapiens
  misc_feature (1)...(136): Xaa = X or * as defined in Table 2
PIERPHELKHRLPHVQKLVEDVGDGVIPAALEEGQAGWSHGFLVFLVEIKSAEGPPGPADSRVRGVRPQRSQSAGPAXRAGRQDGVCRSLGQGRGGGRATSLVLHPPGYPGCWFSVGVPSLPQYTGIRSSSPRTRG

SEQ ID NO: 14502 - protein, 40 aa, Homo sapiens
  misc_feature (1)...(40): Xaa = X or * as defined in Table 2
LQPRXPLTCAPPPCPVQTQTHPISVSQTLLGLEFCCSLSL

SEQ ID NO: 14503 - protein, 123 aa, Homo sapiens
  misc_feature (1)...(123): Xaa = X or * as defined in Table 2
HRHCHPSHTVDGRMESIDVATDGGXRTGVLAVSGLSVSLRTAELSTRKLLMNSEQRINRIMGFHRLGSGAVEXRHTQSMQHDSDKLNSLIIPSVSKRVVLVDSVCTGTTDHQGGVLERKVTTL

SEQ ID NO: 14504 - protein, 351 aa, Homo sapiens
  misc_feature (1)...(351): Xaa = X or * as defined in Table 2
RSHPSGTGRRTSRLESWFLGVSCKKSKVREGPLGPAXXAGXRGVRPQRSQSAGPAXRAGKRQDGGSPEPRAGVGGEVGTQSPGPSGASGYPGMLVSKPVGGTSASWLPAGCPIPSXLSXQRSQGSPSSCLIGHLLALWAAFGLGVTSLPQYTGIRSSSPTAXATVQGDSGHKGGTGGTGLGRGRNTQPDAACGRGHRSSPTRRPHGNPNGNTGCAEGGQARSLLPKLAPKLPGWPVSVPVAVGPGDFGWRQAQYQSSLWDLSSPRNTLGRSATSAGPAPPALLGAGSGRSSGTSPAAPGCSSRCHCWASAPAGVSGGPGGRGAEAPPSPTLAQRGSPPGAAIFPPACGIPP

SEQ ID NO: 14505 - protein, 537 aa, Homo sapiens
  misc_feature (1)...(537): Xaa = X or * as defined in Table 2
LHVPARPPGCGGAFLAGGPCPGWGQPRAQLWPQSAAPGPPHPPALPSPVFPTWPRLLSHXSRPAVEQCPPEPHVYPDPASSWVPKSASPPRVACPCPPALXPFPGDSCLLCTAGLRGPGHDTELPQVWVRPHPGASAEMXAHKPPPLAQKPPRPSISVPQPSAQLWYPAGPWVPTXAGTWLGYGAIXSPQGLFSFYEMEHGVPASLNPPKWEPHDRVXLGGGRXGKSEVPRGTPSLTGLFRGVPQGPPAITGTQKHPFPNDMVSFLISFFCLFCFGFQLGXPPGLXSIHIEPLTGLPGCQGXAXPXVLLSTAGSAHAVXXGSELVHLQSXLHFPSFCPPPVLALDLQVCRPALSAFLACGPPAIPGSWSPEGPVSLWMGVRGVVPLCGLSLYPALXNLARRGPGQPFTGKIGEGTPTPHKPCNHQVRKLGVLPQGGVKTKIEVGFWGPTRPKAGETRGXVGRVPQSLAXPQCVSPEMLPXLSGTPGRSWGPVLSPTPAHSQALRLCGHSPPCWSLVIGLELYFDAMKTLFISNVYIF

SEQ ID NO: 14506 - protein, 164 aa, Homo sapiens
  misc_feature (1)...(164): Xaa = X or * as defined in Table 2
NRRTERLGRWCPCTGAWPAPVNLAKLAPSHDSEQVGSGCVPLAQSMAPPGPAWRAGHHRRRSENPRPGPFFGSFFKRFGTNRGWSRRDDDPGGPGSGSRWPPAPRRGGQWRCPREPGXRRSSSAGRGSSPCALRHRATKASSSCSSPCPPTPTKRERALAAASC

SEQ ID NO: 14507 - protein, 170 aa, Homo sapiens
SVPKREELQGHHRVRGGEHRVWTRQDVLQHRLPATSVWTHPVLPPTARAPALGRASGAARRTAARAAPLPAVPAAAAAPGRARPTTTWPASPPSPRSASPPTAPSSACWSPTPGSPFALRPLRAGLGAVYTRSRAHPRRPLPAHLCVLRHRATKASSSCSSPCPPTPTKR

SEQ ID NO: 14508 - protein, 107 aa, Homo sapiens
  misc_feature (1)...(107): Xaa = X or * as defined in Table 2
GGGFRPLFPPLWRPKPVGPPRVEIFGPACPPWENPFSLKIPNLPGVVGPSDYSRFSEGLARKLPLTRKGRFRXPKFPPLPSFLGKKREIRFPKKTKKKIFINSSSSC

SEQ ID NO: 14509 - protein, 113 aa, Homo sapiens
  misc_feature (1)...(113): Xaa = X or * as defined in Table 2
ERQKLHYKYSKQFLTLFQDWNTNVKAEEPEEQKLATMFREQQKSCLXARMVQRQRHXNKLNXNQQFLRSLEDLEENQSSFTDEQSDLRKEMARLQTKLMKETLQQDLALIHSC

SEQ ID NO: 14510 - protein, 84 aa, Homo sapiens
MWFPWACTLGGQGLSGVTPDHAWDLFRAWLSHLSRVPVSRGPLSASSPPPLLPGTLGCRLRSCCHMGLEPPTASSLSRPGPLSP

SEQ ID NO: 14511 - protein, 296 aa, Homo sapiens
  misc_feature (1)...(296): Xaa = X or * as defined in Table 2
HRKLDRNYSRHMGCGSPGPEPRRAEEPCPPRCMPTKETGAFRSHTRSRLGPFXSLAEPPFPRVPVSRGPLSASSPPPLSSRDAGLQTSQLLPSWGWSPNSIIPELDLGPLSPTGRLSAAFPCRSPPSTGNGKDATSQVDSPHPPSFRSPGLELSRCPGDPVTATSPHEWTQQGKDWRPCSCPLVMQAPPTSHIFLPPPSRSSLRRPRAPSGCPWGCLGRPPAGPWATPLAGLPSWSGVRLPGXGVLPPASRGSGXGPPRHRPDAGSERPAAAAAGFAGPXVCSNSSALPSVYEGLL

SEQ ID NO: 14512 - protein, 33 aa, Homo sapiens
MLKGIPCLHPPLASSSQSDNSQKCLQTLPSLPR

SEQ ID NO: 14513 - protein, 293 aa, Homo sapiens
  misc_feature (1)...(293): Xaa = X or * as defined in Table 2
NPQAPQATKKEGRKNARKGGSVCSGVPWGPPPRKVPTVPWRAESPGPGESHAGFESLRHGHAGAGPKGMPRRLPTENTVSAEGSTGGESGARVPDTGKGLXPATHPLPWGSLSGFXETQRLXGPCLEGGYPGEAGQSLETFLAVVXLGAAGXGWVEARDTFKHPTVCRTAPTKEDSPPETQQSGAGIGEAAVWCQPHIGRRALQEACGEHGDRGRFGGNHAEPDRGGNEAAPTNNNPTHPDGHTSLXGVTGPSPPGRWGNXGPESSEPGLDPGPPHPPTSWCGLFLRSFRLHS

SEQ ID NO: 14514 - protein, 70 aa, Homo sapiens
  misc_feature (1)...(70): Xaa = X or * as defined in Table 2
LSSLPTTISRVFYNLSCSHLXYSLKHHFIYLFIYLFIYLFIYLFIFETESPLSPRLECRSGISAHCNLRL

SEQ ID NO: 14515 - protein, 135 aa, Homo sapiens
  misc_feature (1)...(135): Xaa = X or * as defined in Table 2
DAWANARSRVRLEVAGLRRDLXRCSERWPLARATPFCFGSAMPMYQEESNLSLQALESRQDDILKRLYELKAAVDGLSKMIQTPDADLDVTNIIQADEPTTLTTNALDLNSVLGKDYGALKDIVINANPGFPPLF

SEQ ID NO: 14516 - protein, 88 aa, Homo sapiens
  misc_feature (1)...(88): Xaa = X or * as defined in Table 2
TGLSPGSEIGALPGNLVXAPFFFNPKNLPGAVGPPGVPPFWGGXARGLGGPRSSEFPLVGLGPLAFRLGTKLGPVFKKNQESKKKTSV

SEQ ID NO: 14517 - protein, 86 aa, Homo sapiens
  DOMAIN (25)..(58): PROLINE-RICH PROTEIN 3 domain identified by eMATRIX, accession number DM00215, p-value=2.831e-09, raw score of 19.43
  misc_feature (1)...(86): Xaa = X or * as defined in Table 2
TLRKKFFQPGKTTRFSPHTPFSSFFPQKKEKLXGGNPPKFPPPKKKPPPKKPHHPSSSPPPKSSSSQSHAPPKKGPPPEPLKKNPP

SEQ ID NO: 14518 - protein, 115 aa, Homo sapiens
  DOMAIN (3)..(31): !!!! PROTEIN ALU SUBFAMILY WARNING ENTRY NUCLEAR PHOSPHO domain identified by eMATRIX, accession number PD02454B, p-value= 5.808e-15, raw score of 11.61
  misc_feature (1)...(115): Xaa = X or * as defined in Table 2
RYRSGIPGRRTRAGETPSLLKIQQPGGDGARSXSRLLRRLRQENRLNPEGRGCSELRLCHCTPAWAREXDSLSKKKKKEFKIPIYFLTLLWDVFRTQYTYSIPMCLLCGEMVTDI

SEQ ID NO: 14519 - protein, 147 aa, Homo sapiens
  misc_feature (1)...(147): Xaa = X or * as defined in Table 2
SSGSRSECRFLPLLFNVVLEILAGAIRQQKEIKGIHIGKVKVSIKLTEVINKFIKVAXYKINSNKSVVCLYTNNEQLEKKFKISSSSSSSSSSSSSPNHXGKDLYNENLKTLLKEMKENKWINIPCSWIRRLNNVNISILSKVTYKF

SEQ ID NO: 14520 - protein, 101 aa, Homo sapiens
  DOMAIN (11)..(42): kw TRANSCRIPTASE REVERSE II ORF2 domain identified by eMATRIX, accession number DM01354G, p-value=4.032e-12, raw score of 11.57
  misc_feature (1)...(101): Xaa = X or * as defined in Table 2
TINCVDITDIYRLLHPSTADCTFCPSSNGIFTNIGHILGKTHINKFISIEFIXCLLSDHRIKLEINNKTWKIPKYLXINTLIKEKCEEQFXNTVNXNPNTI

SEQ ID NO: 14521 - protein, 28 aa, Homo sapiens
  DOMAIN (1)..(27): Serpins (serine protease inhibitors) domain identified by PFam, accession name serpin, E-value=0.0024, PFam score of 14.0
AIFFLPDEGKLQHLENELTHDIITKFLG

SEQ ID NO: 14522 - protein, 347 aa, Homo sapiens
  DOMAIN (205)..(247): Serpins proteins domain identified by eMATRIX, accession number BL00284C, p-value=3.727e-24, raw score of 28.56
  DOMAIN (48)..(239): Serpins (serine protease inhibitors) domain identified by PFam, accession name serpin, E-value=1.6e-108, PFam score of 369.4
  misc_feature (1)...(347): Xaa = X or * as defined in Table 2
TMPSSVSWGILLLAGLCCLVPVSLAEDPQGDAAQKTDTSHHDQDHPTFNKITPNLAEFAFSLYRQLAHQSNSTNIFFSPVSIATAFAMLSLGTKADTHDEILEGLNFNLTEIPEAQIHEGFQELLRTLNQPDSQLQLTTGNGLFLSEGLKLVDKFLEDVKKLYHSEAFTVNFGDTEEAKKQINDYLEKGTQGKIVDLVKELDRDTVFALVNYIFFKGKWERPFEVKDTEEEDFHVDQATTVKVPYELKRLGMFNIQHLKKLSSWGAAXXKYLGNATRHLLSCLDGGGNLQHLGKIELHPTIIHSPSFLGEIEGQDRSCPALHFTQIVPLLGTYGFLKSVLGFNWGIH

SEQ ID NO: 14523 - protein, 110 aa, Homo sapiens
  misc_feature (1)...(110): Xaa = X or * as defined in Table 2
RDPPGPGPAITARERKCAKHPSLHQTIVTHLKLXVVLAQLTLEEPTHCHANPDLIFEDMEAMTDLELHELCQQDRHINNFQLDMDLILDSGKFQVVGCILSELKQKDSSN

SEQ ID NO: 14524 - protein, 101 aa, Homo sapiens
  misc_feature (1)...(101): Xaa = X or * as defined in Table 2
LRRSLCSVAQAGVQWWDLSSLQPLPPGPMPFPRLSLPSSWDHRRPRPLPANFLYFXXRRGFTVLARMVSISXPCDPPASASQSAGITGVRHRTQPPRYVFM

SEQ ID NO: 14525 - protein, 58 aa, Homo sapiens
  misc_feature (1)...(58): Xaa = X or * as defined in Table 2
QPLILRCLPPRSIYRFNSIPIKIQVTFFXEKEKSLLKFIQNLKGPXITKTILRKKKVD

SEQ ID NO: 14526 - protein, 155 aa, Homo sapiens
PLTVSERWPLARATPFCFGSAMPMYQVKPYHGGGAPLRVELPTCMYRLPNVHGRSYGPAPGAGHVQEESNLSLQALESRQDDILKRLYELKAAVDGLSRRIKPPRATLDETNIIQADEPTTLTTNALDLNSVLGKDYGALKDIVINANPGSPPLS

SEQ ID NO: 14527 - protein, 74 aa, Homo sapiens
  misc_feature (1)...(74): Xaa = X or * as defined in Table 2
FRNIKHQRDYNEQXYGNKLDNPEDMNKFXETRYTXPNLHQEEIGMLNRPVTNKVLXLVIKIPLTKKSPEPDGFV

SEQ ID NO: 14528 - protein, 139 aa, Homo sapiens
  misc_feature (1)...(139): Xaa = X or * as defined in Table 2
ILKLWGVGTGXTKVPPQVPPTPHSRAXGPPRRECLRRQXPRPXSPGFGPLSFPTSVELMGVKTVLSQGASRERGSWGXKGSPLNGRQFWAQGGALSWVAWGGGGGWRGSNGKGXQPGEQGSSLQPLIPPPRTWRMGPQG

SEQ ID NO: 14529 - protein, 79 aa, Homo sapiens
  misc_feature (1)...(79): Xaa = X or * as defined in Table 2
ERDFLFVPRVGFQGPNLGXLKFPLPGLPLFSGLTLPRNWGLRGPFTTPGXFLDFLKKRGFNIVAQVGLKFWTSGDPPPL

SEQ ID NO: 14530 - protein, 193 aa, Homo sapiens
  misc_feature (1)...(193): Xaa = X or * as defined in Table 2
KYLEIVLLLKYXRNSESCVFILKCSFSLILLELTMKKKILCLIYIXLLTVQTVTQWIFVCPPKTFXSXAIFNKDVXIILIILIVVKLLLVWVQYILSFLILLKLNIXDVCFVLLHXVLFLKNSLCVYELILDLFLYSMIKDNXKFCTFLGPWKFVFXYFLRMSIYFVHNKLALYMKMGLNQIKKVMLLSSKKK

SEQ ID NO: 14531 - protein, 104 aa, Homo sapiens
  DOMAIN (8)..(51): kw TRANSCRIPTASE REVERSE II ORF2 domain identified by eMATRIX, accession number DM01354T, p-value=4.441e-27, raw score of 9.48
  misc_feature (1)...(104): Xaa = X or * as defined in Table 2
LNREKLKAFPLTSGTXQECPLSPLLFNVVREVLATAIRQEKEIRGIQIGKEEVTLSLFVDDMILYLKKPKDCTKKPLELNTFSKVAXYIINIQISVAFLNAKSK

SEQ ID NO: 14532 - protein, 123 aa, Homo sapiens
  misc_feature (1)...(123): Xaa = X or * as defined in Table 2
ESLRSPSRSFSXPSPAYRGHGCSRPASTHNGDPCRAEALSDTPVPQSSGSGDHNEKGPSRSPFQLHXPGPWGPAGCRGRPAPTPWRLPAGPLRDSQEDPPSPEEPGSGGAAGQGGGXGLSCFP

SEQ ID NO: 14533 - protein, 57 aa, Homo sapiens
  misc_feature (1)...(57): Xaa = X or * as defined in Table 2
GKFHISKTLXXNINILLVQLSVVAIGINIYRTSNVEVLLQFLEDQNTFPNFEHLAYR

SEQ ID NO: 14534 - protein, 57 aa, Homo sapiens
  misc_feature (1)...(57): Xaa = X or * as defined in Table 2
GKFHISKTLXXNINILLVQLSVVAIDINIYRTSNVEVLLQFLEDQNTFPNFEHLAYW

SEQ ID NO: 14535 - protein, 99 aa, Homo sapiens
  DOMAIN (9)..(78): Integrase core domain identified by PFam, accession name rve, E-value=9.9e-06, PFam score of 23.8
  misc_feature (1)...(99): Xaa = X or * as defined in Table 2
PPFRTHQARRFAPTQDWQIGFTQHRPGVRKQKYLLVXVDTFTGXVKAFPTRSDKATAVITSLLSDIIPRIGLPTCIQSSSTLALISQISHPSCQAATIQ

SEQ ID NO: 14536 - protein, 117 aa, Homo sapiens
  misc_feature (1)...(117): Xaa = X or * as defined in Table 2
TQTKNSKIYFNXLLFXETGPHSLSPQAGVWWHSHISLQPQPPGLKHPPHPSLLSSWDYRHTSLRPANFXKIFVETGSLHVAQDGLEFLGSSSPPVSASQSARIAGMSLGARARPCLK

SEQ ID NO: 14537 - protein, 97 aa, Homo sapiens
  misc_feature (1)...(97): Xaa = X or * as defined in Table 2
NSFGRTIFFFYXFFFFFFFFFTIQTFKGGPLSPFFFLLFFINPFPRFFFFFXTPFLRALAFFKPFFFFKIVLAEPYFFFTNPQILMRGGGGFSGRGS

SEQ ID NO: 14538 - protein, 50 aa, Homo sapiens
  misc_feature (1)...(50): Xaa = X or * as defined in Table 2
IQSWFNILKSIHVIHHSNRLKNVNHIVSSSSSSSSSSSSPPFLIKKQXKG

SEQ ID NO: 14539 - protein, 110 aa, Homo sapiens
  misc_feature (1)...(110): Xaa = X or * as defined in Table 2
YDEEWRRSTVHPDEVGNLKXEDRXALQNRLRVFLSLMDTGWLDNLLLDIDKADVIVKMLDASVIKMEGGTDNDLNILDQDVEDEHAXKPGEPSKNEEGRAVSGLGDGERK

SEQ ID NO: 14540 - protein, 107 aa, Homo sapiens
  misc_feature (1)...(107): Xaa = X or * as defined in Table 2
VVSYLLVFESSSKXKKIIYQDCIGFVQDCLNIIDPIDSLRGKNVIISLDTEKVVGKIQXPFMTKIFSKLGIEGNFLKWLKYQQSSTVSLLNVXILKAFLSRTEXGCM

SEQ ID NO: 14541 - protein, 230 aa, Homo sapiens
  misc_feature (1)...(230): Xaa = X or * as defined in Table 2
ATYIVDFGFQYNIREGQMLTAFCGMYPYVAPERSLGQACQXPARDIQSLSVILYFRNTVGRRARTLPFYSAEASKLQEKILTGRYHAPPLFALQLDSLIKLLMLNARKGPSLXLMKNPWVKRIQKMPLIPYEEPLRGPPQTIQLMVAMGFQAKNISVAIIERKFNYPMATYLILXHTKQERKCSTIRELSLPPGVATSPSPSTELSTFPLSLMRAHREPAFNVQPPEESQ

SEQ ID NO: 14542 - protein, 112 aa, Homo sapiens
  DOMAIN (38)..(109): RNA recognition motif. domain identified by PFam, accession name rrm, E-value=5.1e-15, PFam score of 63.3
  misc_feature (1)...(112): Xaa = X or * as defined in Table 2
SSSYTPEYWQXRSRSHSPMSNQRRHTGRRANPDPNTCLRVFGLSLYTTDRDLREVCSXYGPLNGANVVYNQQTGRSQGFAFVHFXGIDDSKEAMVRANRKELDDRRIRVDYS

SEQ ID NO: 14543 - protein, 80 aa, Homo sapiens
  misc_feature (1)...(80): Xaa = X or * as defined in Table 2
RPGGQFCLMEASPSGFNPFFLLNLPREWELRVPPPTRGNFFXFLKKNGFIEVNPGGFDFLNSNDPPAFASKGVGLTALTP

SEQ ID NO: 14544 - protein, 113 aa, Homo sapiens
  misc_feature (1)...(113): Xaa = X or * as defined in Table 2
HEPNGFYAEIECERCNSPELDEEGYSIIPDEPGSTNGKHFYSSSESEYXEXSHKIYIQIKPSLSTDILNNAAPVDELKASIGNIALSPXPEGAIKRNLSREEVARPRRFTPSP

SEQ ID NO: 14545 - protein, 100 aa, Homo sapiens
  misc_feature (1)...(100): Xaa = X or * as defined in Table 2
HEEKNEKIRNVGLCEAIVQFTRXYLXVCLXRSVNSXNCCWRIVPNIFFXPLXTFSPSKPAKSLHTQKNRQFFNEPEENFWMVMVFTYTVYLSEIVWVELW

SEQ ID NO: 14546 - protein, 55 aa, Homo sapiens
  misc_feature (1)...(55): Xaa = X or * as defined in Table 2
SARGPDGFTAEFYQTFKEELVQILLKQFQRIKGESSLKSLXETSITLIPKTRKGT

SEQ ID NO: 14547 - protein, 110 aa, Homo sapiens
  misc_feature (1)...(110): Xaa = X or * as defined in Table 2
ARDRAALETVIRRARPELRRPGVQGIPRVHELKIEEYVQRGLQRVGLDPQLPLNLAALYAHVAXEKRVVSILSRTILIVILVESLILLIIVLTYGYQLSILCTCSVGNIF

SEQ ID NO: 14548 - protein, 104 aa, Homo sapiens
  misc_feature (1)...(104): Xaa = X or * as defined in Table 2
LLFSKCRAVEKNLSKEDPHMETIKVAFVMTSGERDTGLTEPMAGXRGSXGSXXDGPARGHETSLGHRGVSGDGGSMGPSLTANALPSISRPFPDSVTDSGSAPL

SEQ ID NO: 14549 - protein, 264 aa, Homo sapiens
  misc_feature (1)...(264): Xaa = X or * as defined in Table 2
FFYREVKPSLFVDCKILITEIPKESNRVLQITRELSKMLAYKVSMLKSILFILTREYKKVKMPFNIVYNNTKYSRINLMKDIYDLYTAIYPSTAALKYRYMCNLQNIARRNXRPPLNKWWREEXYSWIEGLVVKILVFPKQIYRFNASPNKKSPPLFNKLIPKFPXKYKGRRISQTNLGRITLQDLKIYYKTTLKNIVWYWYEVRQRLLPPAPQSAPIPRTCWQLSPSDLQGLKGAEEGLTDWGGKQSGTEITSGHLPPLSTFG

SEQ ID NO: 14550 - protein, 847 aa, Homo sapiens
  DOMAIN (256)..(309): INHIBITOR HEAVY CHAIN CHANNEL IN domain identified by eMATRIX, accession number PD01101B, p-value=1.000e-40, raw score of 21.53
  DOMAIN (274)..(457): von Willebrand factor type A domain identified by PFam, accession name vwa, E-value=1.1e-08, PFam score of 42.3
MKPPRPVRTCSKVLVLLSLLAIHQTTTAEKNGIDIYSLTVDSRVSSRFAHTVVTSRVVNRANTVQEATFQMELPKKAFITNFSMIIDGMTYPGIIKEKAEAQAQYSAAVAKGKSAGLVKATGRNMEQFQVSVSVAPNAKITFELVYEELLKRRLGVYELLLKVRPQQLVKHLQMDIHIFEPQGISFLETESTFMTNQLVDALTTWQNKTKAHIRFKPTLSQQQKSPEQQETVLDGNLIIRYDVDRAISGGSIQIENGYFVHYFAPEGLTTMPKNVVFVIDKSGSMSGRKIQQTREALIKILDDLSPRDQFNLIVFSTEATQWRPSLVPASAENVNKARSFAAGIQALGGTNINDAMLMAVQLLDSSNQEERLPEGSVSLIILLTDGDPTVGETNPRSIQNNVREAVSGRYSLFCLGFGFDVSYAFLEKLALDNGGLARRIHEDSDSALQLQDFYQEVANPLLTAVTFEYPSNAVEEVTQNNFRLLFKGSEMVVAGKLQDRGPDVLTATVSGKLPTQNITFQTESSVAEQEAEFQSPKYIFHNFMERLWAYLTIQQLLEQTVSASDADQQALRNQALNLSLAYSFVTPLTSMVVTKPDDQEQSQVAEKPMEGESRNRNVHSETTMTTQTPACPSCSRSRAPAVPAPIQAPSAILPLPGQSVERLCVDPRHRQGPVNLLSDPEQGVEVTGQYEREKAGFSWIEVTFKNPLVWVHASPEHVVVTRNRRSSAYKWKETLFSVMPGLKMTMDKTGLLLLSDPDKVTIGLLFWDGRGEGLRLLLRDTDRFSSHVGGTLGQFYQEVLWGSPAASDDGRRTLRVQGNDHSATRERRLDYQEGPPGVEISCWSVEL

SEQ ID NO: 14551 - protein, 114 aa, Homo sapiens
  misc_feature (1)...(114): Xaa = X or * as defined in Table 2
GNPATPSHCSLPQPPTPQEGAAYNPDFFFFXKQPXQPKPQVSSQPPWPLSTSLPPACPSCSRSRAPAVPAPIQAPSAILPLPGQSVERLCVDPRHRQGPVNLLSDPEQGVEVTG

SEQ ID NO: 14552 - protein, 971 aa, Homo sapiens
  DOMAIN (295)..(348): INHIBITOR HEAVY CHAIN CHANNEL IN domain identified by eMATRIX, accession number PD01101B, p-value=1.000e-40, raw score of 21.53
  DOMAIN (313)..(496): von Willebrand factor type A domain identified by PFam, accession name vwa, E-value=1.1e-08, PFam score of 42.3
EEGRQQSPAADVKTGLRAPLAASAWPHRCCVRRLLARITMKPPRPVRTCSKVLVLLSLLAIHQTTTAEKNGIDIYSLTVDSRVSSRFAHTVVTSRVVNRANTVQEATFQMELPKKAFITNFSMIIDGMTYPGIIKEKAEAQAQYSAAVAKGKSAGLVKATGRNMEQFQVSVSVAPNAKITFELVYEELLKRRLGVYELLLKVRPQQLVKHLQMDIHIFEPQGISFLETESTFMTNQLVDALTTWQNKTKAHIRFKPTLSQQQKSPEQQETVLDGNLIIRYDVDRAISGGSIQIENGYFVHYFAPEGLTTMPKNVVFVIDKSGSMSGRKIQQTREALIKILDDLSPRDQFNLIVFSTEATQWRPSLVPASAENVNKARSFAAGIQALGGTNINDAMLMAVQLLDSSNQEERLPEGSVSLIILLTDGDPTVGETNPRSIQNNVREAVSGRYSLFCLGFGFDVSYAFLEKLALDNGGLARRIHEDSDSALQLQDFYQEVANPLLTAVTFEYPSNAVEEVTQNNFRLLFKGSEMVVAGKLQDRGPDVLTATVSGKLPTQNITFQTESSVAEQEAEFQSPKYIFHNFMERLWAYLTIQQLLEQTVSASDADQQALRNQALNLSLAYSFVTPLTSMVVTKPDDQEQSQVAEKPMEGESRNRNVHSGSTFFKYYLQGAKIPKPEASFSPRRGWNRQAGAAGSRMNFRPGVLSSRQLGLPGPPDVPDHAAYHPFRRLAILPASAPPATSNPDPAVSRVMNMKIEETTMTTQTPAPIQAPSAILPLPGQGVERLCVDPRHRQGQVNLLSDPEQGVEVTGQYEREKAGFSWIEVNFKNPLVWVHASPEHVVVDSGTEESSAYKVGRETLFSVMPGLKMTMDKTGLLLLSDPDKVTIGLLFWDGRGEGLRLLLRDTDRFSSHVGGTLGQFYQEVLWGSPAASDDGRRTLRVQGNDHSATRERRLDYQEGPPGVEISCWSVEL

SEQ ID NO: 14553 - protein, 112 aa, Homo sapiens
  misc_feature (1)...(112): Xaa = X or * as defined in Table 2
DAWVSVLCCNLSEAKRRINSLSYNQCENIRRLPSFRDVWNGENSRYVEKQASEQQVELLTNERYLMEESQLLLQYLHVYHMNYFLDLTCRPTFYCYLTEAPIGXPMCKGYLS

SEQ ID NO: 14554 - protein, 78 aa, Homo sapiens
  misc_feature (1)...(78): Xaa = X or * as defined in Table 2
ASCRFDFFCLLCYRVLFSNLTVFCFAYRYFNIYMSFCFTFFLYFWWLFCYDFLLDYVFXTLLIVLVCFFPVSFVMFLI

SEQ ID NO: 14555 - protein, 208 aa, Homo sapiens
  DOMAIN (19)..(38): HYDROGENASE (FE) LARGE CHAIN domain identified by eMATRIX, accession number DM01782C, p-value=4.400e-19, raw score of 13.88
  misc_feature (1)...(208): Xaa = X or * as defined in Table 2
PTRPDFFAQQQHLTPDKIYHVTVMPCYDKKLEASRPDFFNQEHQTRDVDCVLTTGEVFRLLEEEGVSLPDLEPAPLDSLCSGAYAXEPTSHRGGGSGGYLDHVFRHASLQLFDSDVVXVSSIHLRXXDFFAQQQHLTPDKIYHVTVMPCYDKKLEASRPDFFNQEHQTRDVDCVLTTGEVFRLLEEEGVSLPDLEPAPLDSLCSGAYA

SEQ ID NO: 14556 - protein, 167 aa, Homo sapiens
  misc_feature (1)...(167): Xaa = X or * as defined in Table 2
PVWWNLQRRTSAGPGTAVPGLAVAXFRQTGLTRSPSSGRDGAGVRDLWNPPPPVPIPLPLGFHLRGPDSTLAEQPSACLPGSPPCRNGLGQPQQHGHLWPGXIGIQFRLGFHGNQGPPGPSNLPYPPFLFAAPLHTRHVPCLHHCCPLTWAALPTPLCLWRCSAIQD

SEQ ID NO: 14557 - protein, 276 aa, Homo sapiens
  DOMAIN (146)..(201): Heat shock hsp90 proteins family proteins domain identified by eMATRIX, accession number BL00298F, p-value=1.000e-40, raw score of 11.21
  DOMAIN (138)..(249): Hsp90 protein domain identified by PFam, accession name HSP90, E-value=2.2e-72, PFam score of 253.9
MGKDFMSKTPKAMATKAKIDKWDLIQLKSFCTAKETTIRVNRQPTEWEKIFAIYSSDKGLISRIYNELQQIYKKKTNNPINKWAKDMNRHFSKEDIYAAKRHMKKCSSSLAIREMQIKTTMRYHLTPVRMAIIKKSGNNRKKKNNIKLYVCRVFITDNCEELIPEYLNFIRVLVDSEDLPLNISHKMLQQSKILKVIRKNLVKKCLELFTELAEDKENYKKFYEQFSKNIKLGIHEDSQNQKKLSELLRWLTKRREDGAAILNMIGTTDGIYVCLA

SEQ ID NO: 14558 - protein, 257 aa, Homo sapiens
  DOMAIN (22)..(77): Heat shock hsp90 proteins family proteins domain identified by eMATRIX, accession number BL00298G, p-value=9.847e-19, raw score of 24.57
  DOMAIN (1)..(257): Hsp90 protein domain identified by PFam, accession name HSP90, E-value=2e-77, PFam score of 270.7
  misc_feature (1)...(257): Xaa = X or * as defined in Table 2
NISREMLQQSKILKVIRKNLVKKCLELFTELAEDKENYKKFYEQFSKNIKVGVNNHXFSNWPLXFFFFFFNSESLCKEHTLFQLGIHEDSQNRKKLSELLRYYTSASGDEMVSLKDYCTRMKENQKHIYYITGKRTLCYSHTRRSYNLVGSVGVFSTQVALLQLVLIXARXLTXTRSFSVLGSAXVSGXQEKSELDETILNCXKVXKXLCNTSGETKDQVANSAFVERLRKHGLEVIYMIEPIDEDCAQQLEEFXGK

SEQ ID NO: 14559 - protein, 58 aa, Homo sapiens
  misc_feature (1)...(58): Xaa = X or * as defined in Table 2
KYETIRYRDSVKGRFTIFXHLTKNCLHLRAIGLGADDSHFYSCANDVADSGTTLFFDS

SEQ ID NO: 14560 - protein, 760 aa, Homo sapiens
  DOMAIN (59)..(82): 90 KD HEAT SHOCK PROTEIN SIGNATURE domain identified by eMATRIX, accession number PR00775B, p-value=3.571e-28, raw score of 3.52
  DOMAIN (36)..(760): Hsp90 protein domain identified by PFam, accession name HSP90, E-value=0, PFam score of 1445.1
QLLQRPGVAVPLVLCGHLAKMPEETQTQDQPMEEEEVETFAFQAEIAQLMSLIINTFYSNKEIFLRELISNSSDALDKIRYETLTDPSKLDSGKELHINLIPNKQDRTLTIVDTGIGMTKADLINNLGTIAKSGTKAFMEALQAGADISMIGQFGVGFYSAYLVAEKVTVITKHNDDEQYAWESSAGGSFTVRTDTGEPMGRGTKVILHLKEDQTEYLEERRIKEIVKKHSQFIGYPITLFVEKERDKEVSDDEAEEKEDKEEEKEKEEKESEDKPEIEDVGSDEEEEKKDGDKKKKKKIKEKYIDQEELNKTKPIWTRNPDDITNEEYGEFYKSLTNDWEDHLAVKHFSVEGQLEFRALLFVPRRAPFDLFENRKKKNNIKLYVRRVFIMDNCEELIPEYLNFIRGVVDSEDLPLNISREMLQQKSKILKVIRKNLVKKCLELFTELAEDPANYQKFYEQFSKNLKALEYHEDSQNRKEAFPELLRYYTSASSDEMDTLKDYCTRMKENQKHIYYITGETKDQVANSSLCGTVFRKHGLEVIYMIEPIDEYCVQQLKEFEGKTLVSVTKEGLELPEDEEEKKKQEEKKTKFENLCKIMKDIKEKKVEKVVVSNRLVTSPCCIVTSTYGWTANMERIHGKLQALKETTSTMGFTWQPKKHLEINPDHSIIETLRQKAEADKNDKSVEGILVILLYETALLSSGFSLEDPQTHANRIYRMIKLGLGIDEDDPTADDTSAAVTEEMPPLEGDDDTSRMEEVD

SEQ ID NO: 14561 - protein, 83 aa, Homo sapiens
  misc_feature (1)...(83): Xaa = X or * as defined in Table 2
RMNLDSDGMDDIISQESSLDMEGNYKKAQKNEREAIRLILALXSFFDDGSRIYISCEQSGKQIFSPHXXGINFQIGLSSTWSP

SEQ ID NO: 14562 - protein, 146 aa, Homo sapiens
  DOMAIN (43)..(107): Zinc finger domain identified by PFam, accession name zf-NF- X1, E-value=0.017, PFam score of 21.7
  misc_feature (1)...(146): Xaa = X or * as defined in Table 2
TLLMFNNNVSLLTLTFCMFLEFSLPCTEDVPTCGDSCDKVLECGIHRCSQRCHRGPCTXVIYFHAVFQAGPECLHCEEGCSKSRPLGCLHPCILRCHPGECPPCVQMLGTAESAVLPQACHCPQFCLQSPPFLFTHKEPQSSWSSG

SEQ ID NO: 14563 - protein, 106 aa, Homo sapiens
  misc_feature (1)...(106): Xaa = X or * as defined in Table 2
SGWSLTEQDPYNNIVRTAIEAMAAVFGGTQSLHTNSFDEALGLSTVKSSLIPFSLHFLFSXQFSLSYISIFLFILIFFYFYLSLLIHFFYIFYLISIFLFFFLFIY

SEQ ID NO: 14564 - protein, 120 aa, Homo sapiens
  misc_feature (1)...(120): Xaa = X or * as defined in Table 2
RELLAFWQNFKLRPQGPFFSPGPGGEKKRXSLPKTPPKGGPPGPSPNGRLPSGGQLPPPRGGSPQGSSSLPKGPQGWGPPFPXRSPPCPPHRIGVPQVSSSPTPGLVFPRGPLNPGNLGG

SEQ ID NO: 14565 - protein, 66 aa, Homo sapiens
  misc_feature (1)...(66): Xaa = X or * as defined in Table 2
LVRSLTSLPHSPPNPTLSLPSXLPPYGPVYLSHYPPSPPITSLTHPPPSPSPPTSLPPPSPITPTS

SEQ ID NO: 14566 - protein, 107 aa, Homo sapiens
  DOMAIN (28)..(51): Phorbol esters / diacylglycerol binding domain proteins domain identified by eMATRIX, accession number BL00479A, p-value= 9.234e-09, raw score of 19.86
  DOMAIN (28)..(83): Phorbol esters/diacylglycerol binding dom domain identified by PFam, accession name DAG_PE-bind, E-value=0.027, PFam score of 6.2
  misc_feature (1)...(107): Xaa = X or * as defined in Table 2
NEGECRKDVEMEPVLQAEKTNFQNHKGHEFIPTLWHFPANCDACAKPLWHVIKPPPALECRRCHVKCHRDHLDYTDDLIFPCNIRYDVSSTLRYSXLLHFSDEITII

SEQ ID NO: 14567 - protein, 120 aa, Homo sapiens
  misc_feature (1)...(120): Xaa = X or * as defined in Table 2
EHTRAEDHMLEEREERXRAERAQREEXLPEYQERMKTLXEADRNIRPRELEIEERERRTEEERILGDSSLSRKDSRWGDRDSEGAWRTGPEAHSEWTIGSPQMEWRPXEWLYDDRSYTGD

SEQ ID NO: 14568 - protein, 142 aa, Homo sapiens
RGRVEAAPGYGSHLCHNFLPCTYWQKFGQPPGLQRTAASYSSDTMLGTKAETHPTFAFFPAQGPKCESWQSRDTSARSETLGTACSYNTGNNWAGAAAHGDTEDLQWLQRKRERSERKTRTDLKGVRTSNGTARDDNCAYSP

SEQ ID NO: 14569 - protein, 234 aa, Homo sapiens
  misc_feature (1)...(234): Xaa = X or * as defined in Table 2
PDCPSRPTYARGTSPGNKTENAHKGPKSVSSAPKMRXSLQDTGREDTREPVRFHTDTGTKEQTVIFADXKIAGRCKTXGQFPRQRPPHGGGSTPQLFSAAIGTSFPARFPAVKVHGFKTSPTGRGGGHWANTRSFSWLATKKRESERKTRTDLKGVRTSNGTARDDNCAYSPHRRERGAPPPAHGLYRRSVCARKNHIVLSKTGGRSVRRHDHRRSRSWRLRPGVSHHMRRSQR

SEQ ID NO: 14570 - protein, 98 aa, Homo sapiens
  DOMAIN (5)..(39): Tubulin subunits alpha beta, and gamma proteins. domain identified by eMATRIX, accession number BL00227A, p-value=3.305e- 10, raw score of 24.55
  DOMAIN (5)..(89): Tubulin/FtsZ family domain identified by PFam, accession name tubulin, E-value=1.6e-24, PFam score of 94.9
  misc_feature (1)...(98): Xaa = X or * as defined in Table 2
SLPTIRECIYIHVVHAGDHIGNACWELYCLXHGIHPDGHMPRDLTIGGGEDSFNTFFTETGASEPVPRAAFADLEPTVIDEVGTVTYGQYLQLXQLIK

SEQ ID NO: 14571 - protein, 70 aa, Homo sapiens
  DOMAIN (30)..(50): kw TRANSCRIPTASE REVERSE II ORF2 domain identified by eMATRIX, accession number DM01354W, p-value=5.000e-11, raw score of 12.64
  misc_feature (1)...(70): Xaa = X or * as defined in Table 2
LGIDLTKKVKKLSKKNYKTLMKKIEDDSNXKDNSCLXIRMTILPKAIYRFNTISVNIPMRFLPDAWADAW

SEQ ID NO: 14572 - protein, 129 aa, Homo sapiens
  DOMAIN (64)..(87): TRANSFORMING PROTEIN P21 RAS SIGNATURE domain identified by eMATRIX, accession number PR00449E, p-value=4.553e-10, raw score of 13.50
  DOMAIN (1)..(128): Ras family domain identified by PFam, accession name ras, E- value=0.0075, PFam score of -104.5
RGAQAIIIVFNLNDVASLEHPSKWLADALKENDLPSVLLFLTRAQYALMEKDALQVAQEMKAEYWAVSSLTGENVREFFFRVAALTFEANVLAELEKSGARRIGDVVRINSDDSNLYLTASKKKPTCCP

SEQ ID NO: 14573 - protein, 48 aa, Homo sapiens
YALMEKDALQVAQEMKAEYWAVSSLTGINSDDSNLYLTASKKKPTCCP

SEQ ID NO: 14574 - protein, 212 aa, Homo sapiens
  misc_feature (1)...(212): Xaa = X or * as defined in Table 2
DQRGGNWAYECQWEGPCRLTHPLLSTSHGRQWLADALKENDPSSVLLFLVGSKKDLSVSVPVGGLPSLVRECPPLTLAFPQTPAQYALMEKDALQVAQEMKAEYWAVSSLTGEVGGFRALLXHSCLALLSLLHLQLCPVSPDPALPLSTYLLSVSGENVREFFFRVAALTFEANVLAELEKSGARRIGDVVRINSDDSNLYLTASKKKPTCC

SEQ ID NO: 14575 - protein, 172 aa, Homo sapiens
  DOMAIN (4)..(27): TRANSFORMING PROTEIN P21 RAS SIGNATURE domain identified by eMATRIX, accession number PR00449C, p-value=8.920e-15, raw score of 17.27
  DOMAIN (1)..(151): Ras family domain identified by PFam, accession name ras, E- value=3.4e-08, PFam score of -43.7
  misc_feature (1)...(172): Xaa = X or * as defined in Table 2
MERFEVLGIPFSLQLWDTAGQERFKCIASTYYRGAQAIIIVFNLNDVASLEHTKQGVAECLKEEXPSRVVLFLLGFKKDLSTPAQYALMEKDAFPGGPRRLKAEYWAVSSLTGENVREFFFRVAALTFEANVLAELEKIGGLDVIGMFVRINSDDSNLYLTASKEEAPHVCP

SEQ ID NO: 14576 - protein, 86 aa, Homo sapiens
FFFFLPEMTSTVYCRYTNEPSLWLGTVHGPADEHGQPTPFPTPESCAVIHSRQKVAVSNTGHRFPWLGGASLIHRLAHLSEWPTSR

SEQ ID NO: 14577 - protein, 187 aa, Homo sapiens
  misc_feature (1)...(187): Xaa = X or * as defined in Table 2
RCFARYRPVHADPLYCQGHAAPVGYSTVSRTHAPGGVQLPPPPPYTAGRGAQVGRGCSPARSGAWPHRSGAVDHPLTQGDHTAPDHSSGLNDHSHHGAGARHLPPPQGHAAWPPXDLNPCRTQPSXPSHSPRPGSPLAPVAPPWALGWNQEYFPKSDSLLLLAKLYLIQWVFPCTVDFPNVINFNIK

SEQ ID NO: 14578 - protein, 97 aa, Homo sapiens
  DOMAIN (18)..(55): Syndecan domain identified by PFam, accession name Syndecan, E-value=4.1e-07, PFam score of 21.2
  misc_feature (1)...(97): Xaa = X or * as defined in Table 2
MRLQLPSTSHLPVKRGXKEGEAVVLPEVEPGLTAREQEATPRPRETTQLPTTHQALGWNQEYFPKSDSLLLLAKLYLIQWVFPCTVDFPNVINFNIK

SEQ ID NO: 14579 - protein, 41 aa, Homo sapiens
RLRWPLREVGQSVDQRCTTKPREPVSGIRYCDFLPGVYDCT

SEQ ID NO: 14580 - protein, 263 aa, Homo sapiens
  DOMAIN (202)..(245): Syndecans proteins domain identified by eMATRIX, accession number BL00964B, p-value=1.000e-40, raw score of 12.05
  DOMAIN (2)..(261): Syndecan domain identified by PFam, accession name Syndecan, E-value=2.7e-151, PFam score of 435.6
  misc_feature (1)...(263): Xaa = X or * as defined in Table 2
XAGALQDITLSQQTPSTWKDTQLLTAIPTSPEPTGLEATAASTSTLPAGEGPKEGEAVVLPEVEPGLTAREQEATPRPRETTQLPTTHQASTTTATTAQEPATSHPHRDMQPGHHETSTPAGPSQADLHTPHTEDGGPSATERAAEDGASSQLPAAEGSGEQDFTFETSGENTAVVAVEPDRRNQSPVDQGATGASQGLLDRKEVLGGVIAGGLVGLIFAVCLVGFMLYRMKKKDEGSYSLEEPKQANGGAYQKPTKQEEFYA

SEQ ID NO: 14581 - protein, 418 aa, Homo sapiens; identical to SEQ ID NO: 8354
  DOMAIN (90)..(122): GTP-binding elongation factors proteins domain identified by eMATRIX, accession number BL00301B, p-value=5.500e-31, raw score of 20.09
  DOMAIN (5)..(373): Elongation factor Tu family domain identified by PFam, accession name GTP_EFTU, E-value=5.6e-138, PFam score of 467.7

SEQ ID NO: 14582 - protein, 319 aa, Homo sapiens
  DOMAIN (192)..(199): PLANT PEC FAMILY METALLOTHIONEIN SIGNATURE domain identified by eMATRIX, accession number PR00877B, p-value=4.000e-10, raw score of 4.74
  misc_feature (1)...(319): Xaa = X or * as defined in Table 2
TSGSHSGITQFLPCFSGAQPTGQSPXKRPSPGPQHRAARCTHFPEGSPFFGSSCSRPRNRAWVSAWWAGSXRPAQWSQELTQTPKQAGGQWRGPAPSRTPMPRRLEPPQHPKEQERHGVALEQSRPRTLPPALGHTCVXDQPSAFPVPAQPWGNPSMGSAHERSWVCHVLXLSSHPLIQGRRGSPCPPPVGLGISPSPCPGGQPRPQPDSSLLGAXASGFSGTPKFKGPGTHHGPCQPLPSPAGLGSGLGEDLEAVGRTQPSNAPLAPGQXATGGSALQPPVHTASNAPGPVSPDAPPPLPDQAQRLQDQQAKAKPCPR

SEQ ID NO: 14583 - protein, 213 aa, Homo sapiens
  misc_feature (1)...(213): Xaa = X or * as defined in Table 2
PRVRLNGIVDRXVLGCLPCYDLGIFTDRDLGVHADAHDLVENLKDLIAXXIPFLAEGIRIHGDKVTVALRPFHERMEACFKQLKEMVENEYGVRIMPSSLDDXRGIRPRSMVRAFTMPSSSRPLSVASVSSLSSDSTPSRPGSDGFALEPLLPKKMLSRSHDKLYKDDLDTDKKDYMTYNWTCRQFQISRDKMKRTDVSLYIMLVSPNPNLSY

SEQ ID NO: 14584 - protein, 93 aa, Homo sapiens
SLLSEIFATSSSPDSSSMIPPMWLTSMMFCVGGWAQRKLGLCGGTNTDDDGDRGCRFLESGCWAQRKLGLSGDPPASASQSAGITGMSHHARP

SEQ ID NO: 14585 - protein, 173 aa, Homo sapiens
  misc_feature (1)...(173): Xaa = X or * as defined in Table 2
ILFLFLFYFISFLRWSFTFVAQAGVQWXDLDSLQSPPPRFKXLACLSLLSSWDYRHMPPRPANFLYFXXRWGFTMLARLVLDSXPQCDPPASASQSVGITGMSHHAGPTMKLLNPQSEVIFSPRNSHSTLLTPLSRHLPHPISISTWCIHYAPLHTVSISAEEAPWLFACPQS

SEQ ID NO: 14586 - protein, 104 aa, Homo sapiens
  DOMAIN (44)..(58): C2H2-TYPE ZINC FINGER SIGNATURE domain identified by eMATRIX, accession number PR00048A, p-value=5.235e-12, raw score of 10.52
  DOMAIN (17)..(67): Zinc finger, C2H2 type domain identified by PFam, accession name zf-C2H2, E-value=3e-12, PFam score of 54.1
  misc_feature (1)...(104): Xaa = X or * as defined in Table 2
EESFTAHMLRHRGVQPFPCGQCDKAYGTQRDLKEHQVVHSGARPFACDQCGKAFARRPSLRLHRMTHQGQLPMPLAHALCGAAPGSQGFLWNHMRLHTXKKPFL

SEQ ID NO: 14587 - protein, 129 aa, Homo sapiens
  misc_feature (1)...(129): Xaa = X or * as defined in Table 2
PLCTREKSEYMCTSYSLARSRVGQTLCKGVQWRHLSSLXPPPPGFKQFSCLSLPSRWDYRCPPPHLANFFYFXQRQGFTILARLALNSXPRDPPASASQIAGITGVSHRDRLIINFLDFEGYTXSATDS

SEQ ID NO: 14588 - protein, 76 aa, Homo sapiens
  misc_feature (1)...(76): Xaa = X or * as defined in Table 2
QIEQLHRRFXAAXRGDQPTIRKENFNNVPDLELNPIRSKIVRAFFDNRNLRKGPRGLADEINYEDFLTIMFYFLSI

SEQ ID NO: 14589 - protein, 92 aa, Homo sapiens
  misc_feature (1)...(92): Xaa = X or * as defined in Table 2
KINMGILLKLVYRFSIHPVKTPAGLFTKNEQXXTEFDKRILKSIWKCKEPYSTRTMFKKTEAKGLPSPDFKTYYEATEFKTSXDQQKDRYKE

SEQ ID NO: 14590 - protein, 118 aa, Homo sapiens
  misc_feature (1)...(118): Xaa = X or * as defined in Table 2
RRLFFFFFFLRRSLDSVAQVGVQWHNIGSLQAPPPGFTPFSCLSLPSSXDHRRPPPCPANFLYFXXRQGLTMLAKLVSTSXPCDLPAPAHQSAGITDMSHRARLIVSLFKRQKTYGNN

SEQ ID NO: 14591 - protein, 491 aa, Homo sapiens
  DOMAIN (448)..(462): GTP-binding elongation factors proteins domain identified by eMATRIX, accession number BL00301C, p-value=1.000e-10, raw score of 11.73
  DOMAIN (11)..(460): Elongation factor Tu family domain identified by PFam, accession name GTP_EFTU, E-value=2.8e-67, PFam score of 229.4
  misc_feature (1)...(491): Xaa = X or * as defined in Table 2
PLKAKMGKEKTHINIVVIGHVDNGQVSPLLGHLIYKCGGIDKRTIEKFEKEAAEMGKGSFKYAXVLDKLKAERERGITIDISLWKFETSKYYVTYPFDAPGHQRLLSKNMIYRGHLKAXPGLGGPLFGGVLPXLFAAGVWWNLKAGISKNGQTREHALLGLHTWVWKQTKLFGVNKNWISTXGHPTAQKKILKEIVKGKSALTLRKIGYNPDTSSILCPISGWNGDNNAWSPNANMPWFQGDGKVTRKDGNASGTTLLEALDCILPPTRPTDKPLGLPLQDVYKIGGIGTVPVGRVETGVLKPGMVVTFGPVNVTTEVKSVEMHHEALGEALPGDNVGFNVKNVSVKDVRRGNVAGDSKNDPPMEAAGFPAQVIILNHPGQISAGYAPVLDCHTAHIACKFAELKEKIDRRSGKKLEDGPKFLKSGDAAIVDMVPGKPMCVESFSDYPPLGCFAVRDMRQTVAVGVIKAVDKKAAGAGKVTKSAQKAQKAK

SEQ ID NO: 14592 - protein, 112 aa, Homo sapiens
  misc_feature (1)...(112): Xaa = X or * as defined in Table 2
RGDTGRTLAQRGARSSGLPTVLNPGRQLTSAGXPHXYGKARAAMPTPSLVRPVLKVGHSPSPEVSGSAAEIAPWTISSPLYNPSSLPGPASSPMPIPNSSPLASPVSYTVLV

SEQ ID NO: 14593 - protein, 124 aa, Homo sapiens
  DOMAIN (54)..(92): Outer Capsid protein VP4 (Hemagglutinin) domain identified by eMATRIX, accession number PF00426S, p-value=3.813e-10, raw score of 15.67
  misc_feature (1)...(124): Xaa = X or * as defined in Table 2
RSRPELNDYKDKKAATKNVQKKXMQRQKGDIAIDATETQRIIRDCYEHYNKMSSSSSSSSSSSSSSSPSSSSSSSSSSSSPSSSSSSSSSSQSLPSKKNSGSEGFTAEFYQRYKTPLILKLFKK

SEQ ID NO: 14594 - protein, 134 aa, Homo sapiens
  misc_feature (1)...(134): Xaa = X or * as defined in Table 2
ARAARVFLHRTSLNLSNGGTQCXKTMVVHDDEYSEPCMTPSKEGTLIVRQTQSASSTLQKHKSSSSFTPFIDPRLLQISPSSGTTVTSVVGISCNWMRPXSIKHYPTQKGSLSFXISTHTYPQSAFCVIFLHYC

SEQ ID NO: 14595 - protein, 59 aa, Homo sapiens
  misc_feature (1)...(59): Xaa = X or * as defined in Table 2
GSLLPLLFNIILEVLAKAIRQEKSIQNEKEKVXLSLLTDHMIYMXNPTVKKLTTXKLTT

SEQ ID NO: 14596 - protein, 99 aa, Homo sapiens
  DOMAIN (33)..(44): Uroporphyrinogen decarboxylase proteins domain identified by eMATRIX, accession number BL00906E, p-value=5.950e-13, raw score of 13.41
  DOMAIN (1)..(92): Uroporphyrinogen decarboxylase (URO-D) domain identified by PFam, accession name URO-D, E-value=0.024, PFam score of -186.4
PWYLAQAGYEVVGLDWTVAPKKARECVGKTVTLQGNLDPCALYASEEEIGQLVKQMLDDFGPHRYIANLGHGLYPDMDPEHVGAFVDAVHKHSRLLRQN

SEQ ID NO: 14597 - protein, 289 aa, Homo sapiens
  DOMAIN (179)..(217): Uroporphyrinogen decarboxylase proteins domain identified by eMATRIX, accession number BL00906C, p-value=1.000e-38, raw score of 20.94
  DOMAIN (39)..(289): Uroporphyrinogen decarboxylase (URO-D) domain identified by PFam, accession name URO-D, E-value=3.4e-72, PFam score of 253.3
ARSYRQLTMEANGLGLQRIHTDTYPHPHLIARPQGFPELKNDTFLRAAWGEETDYTPVWCMRQAGRYLPEVRETRSAQDFFSTCRSPEACCELTLQALRRFPLDAAIIFSDILVVPQMFSPPPALGMEVTMVPGKGPSFPEPLREEQDLERLRDPEVVASELGYVFQAITLTRQRLAGRVPLIGFAGAPWTLMTYMVEGGGSSTMAQAKRWLYQRPQASHQLLRILTDALVPYLVGQVVAGAQALQLFESHAGHLGPQFFNKFALPYIRDVAKQVKARLREAGLAPVPM

SEQ ID NO: 14598 - protein, 156 aa, Homo sapiens
  misc_feature (1)...(156): Xaa = X or * as defined in Table 2
KQPQPTAPLWQPLKLSSKLGLAPGHGPCCLHLLSALGSLPGLVPWLPSRVGCSSXGLLLTKSPQPSADPGQRRVALHHVLXVEPFASQEAQPPPSLPWWPLRGDTESPQGPSPLSARCTHPGCRSVRGRWGRARGWPARCQGAGGPGGWRTTCPCR

SEQ ID NO: 14599 - protein, 201 aa, Homo sapiens
  misc_feature (1)...(201): Xaa = X or * as defined in Table 2
NSVSKLGLAPGHGALLPPPAERSREASQIPRGRAPGVHYLCLKQPRPRGLLGPQGNERPLPSKPHLCAGLCLGGPGPTSPLPFETIRNWARRPPEAXPQGACILLLSLGDPRGVGXPWVXTPGGLVFWMSLWHFGPQLKPPPLPRSLRPRPSLDLLGRKRHQGQDEKPGGAAPQMRALXPVLPLPPHPGTAPQLVTATRKP

SEQ ID NO: 14600 - protein, 154 aa, Homo sapiens
  misc_feature (1)...(154): Xaa = X or * as defined in Table 2
FALVGQAGTQXCDLGSVQPPPLGFKXFSCLSLLSSXDYRHVPPCWLIFVFLVEQGFVILAKLVSNPXPQCDPPILASQSAGITGVSHCAWLXLSFSFFCXDRVSVTQAGMQWHDLSSLQPLPLGFNXFSCLSLPSSWDYRCVPPHPANFFIFSR

SEQ ID NO: 14601 - protein, 77 aa, Homo sapiens
  DOMAIN (48)..(68): kw TRANSCRIPTASE REVERSE II ORF2 domain identified by eMATRIX, accession number DM01354W, p-value=8.221e-12, raw score of 12.64
LENSFLKTLPLAIACRNIKYMNLTKCESCKLREIKDLNKWGSTPCSTIGKLRIVKMSFLPKLIYKSQKTFFLQTLIK

SEQ ID NO: 14602 - protein, 153 aa, Homo sapiens
  misc_feature (1)...(153): Xaa = X or * as defined in Table 2
KRDPSLSAYPFFKCNLLSTLHFMTAYASLYFIYTEPVFVQHDWLHSKALXIPFHISPSTTIIPLTMVSQPYTEHYIVTKLGEFQVSKGNYIHKRFCFIAQFTIXLVITQPTMLRXISDYLDKYIGFCPQPQMKQERHTYSPPYQGCVYSVVQS

SEQ ID NO: 14603 - protein, 338 aa, Homo sapiens
  DOMAIN (102)..(122): kw TRANSCRIPTASE REVERSE II ORF2 domain identified by eMATRIX, accession number DM01354W, p-value=8.221e-12, raw score of 12.64
  misc_feature (1)...(338): Xaa = X or * as defined in Table 2
FLNWKSKILYSTDDMIIYIENAKESRKKLLEXVNXSKLLDTRSMYKSNAFLYTSNNLGKPAFXKPYPLAIACRKIKYMNLTKCESCKLREIKDLNKWGSTPCSTIGKLRIVKMSFLPKLIYKSQKTFFLADIDKSCFFXDSFTPGLPRLEWPWPRSQAHXKPSNLPGSSNSPGLSLPSSWDSTSACHRRLANFFVFLVEMWXCMPTVPTTWEAKERAHLSPDVRGYISCDCATTLQPGQQNEISASNKTTVINIVSYWCKVIHTRKWCPEQTTSMSLRVFTNLXRLGHWESRVSTNRTEPTNHTDKKVNLDPYHIWYTKMNSKWITDLNVKGKTIKVP

SEQ ID NO: 14604 - protein, 135 aa, Homo sapiens
  DOMAIN (17)..(134): Intermediate filament proteins domain identified by PFam, accession name filament, E-value=1.8e-26, PFam score of 101.4
  misc_feature (1)...(135): Xaa = X or * as defined in Table 2
DVCKPDLTVGLRYAPHQYKSVVATNLPEAKYWFLNWIADLSKAAPRNNDALGTSAQAYYGYRKQEQILLXEEDALTGTNESLERQMREMEENFAVEAANYQDTIGRLQDEIHNMKEEMARHLREYQDLLNVKMGP

SEQ ID NO: 14605 - protein, 995 aa, Homo sapiens
  DOMAIN (719)..(767): Intermediate filaments proteins domain identified by eMATRIX, accession number BL00226B, p-value=1.450e-38, raw score of 23.86
  DOMAIN (622)..(952): Intermediate filament proteins domain identified by PFam, accession name filament, E-value=4.5e-82, PFam score of 286.1
  misc_feature (1)...(995): Xaa = X or * as defined in Table 2
MNIDAKIHNKILANRIQQHIKKLIHHDQVGFIPGMQGWFNTSKSINVIQHINRTNDKNHMIISINAEKTFDKTQQPFMLKTLNKLGIDGTYLKIIRAIYDKPTANIIPNGQKLEAFPLKTGTRQGCPLSSLLFNIVLEVLARAIRQEKEIKGIQLGKEEVKLSLFADDMIVYLEKPIISAQNLLKLTSNFSKVSGYKINVQKSQAFLYTNKRQTESQIMSELPFTIASKRIKYLGIQLTRDVKDLFKKIYQSLLNDIKEDTNKWKNIPCSGIGRINIVKMATLPKCLPTTCIHMIRPQFRVSSVRRDFNSEVAMEELKQTRKPIFLAREVRTLTSFPIFQPYGFLILRGHRQEQFTSTVVLRITWTKGILVIQVNPWLTTLEAGISKAPDKPWNPSQVAPALPQKPAQVLGLWLAFSVNRTWMQLETIILSKLMQEQKSKYCMLSLISGSESVSKRRIALGSALHVEGPTAHSKAMAQLSPRQRRSRAPTTHTHRALVRLFSGSQSAPPPPPRPSPPSAAMSTRSVSSSSYRRMFGGPGTASRPSSSRSYVTTSTRTYSLGDALRPSTSRSLYASSPGGVYATRSSAVRLRSSVPGVRLLQDSVDFSLADAINTEFKNTRTNEKVELQELNDRFANYIDKVRFLEQQNKILLAELEQLKGQGKSRLGDLYEEEMRELRRQVDQLTNDKARVEVERDNLAEDIMRLREKLQEEMLQREEAENTLQSFRQDVDNASLARLDLERKVESLQEEIAFLKKLHEEEIQDLQAQIQEQHVQIDANVPXHDFTTARRDERQQYESVAAKNLQEAEEWYKCQVCXPLLRASNRNNDPLRQAKAGVPLSYRRTGCSPLTCESGCPXKGTKXSPLERQMREMEENFCRXKLLNYPRPLLARLQDEDSGIWKEEMARHLREYQDLLNVKMGPXALEIATYRKLLEGEESRISLPLPNFSSLNLRETNLDSLPLVDTHSKRTLLIKTVGTRRLDRLINETSQHHDDL

SEQ ID NO: 14606 - protein, 118 aa, Homo sapiens
  misc_feature (1)...(118): Xaa = X or * as defined in Table 2
PRVRWNRKVQKQIISIHYGQXIVDKGSRTIQXRKNSVFNXXCXDKXIFTCKRMNLYLYFVSSSSSSSSSSSSSSSSSSSSSLXEENTGINLHDLGFGNGFLDMAPKAQATTAXLYLYF

SEQ ID NO: 14607 - protein, 608 aa, Homo sapiens
  DOMAIN (344)..(391): kw TRANSCRIPTASE REVERSE II ORF2 domain identified by eMATRIX, accession number DM01354V, p-value=5.869e-27, raw score of 12.97
  DOMAIN (112)..(373): Reverse transcriptase domain identified by PFam, accession name rvt, E-value=5.5e-07, PFam score of 29.5
  misc_feature (1)...(608): Xaa = X or * as defined in Table 2
MQYNIFQVLYILDELHGILGNLTINKFIHRSIVANNLDDLDEKTHQLTKLAQKEIKNPNRPVTSKEIEPVIKNLPTKESPGLNEFTGQYYGQTYXRKELTLILLELSQKMEEKGVIPVTFYKADITLTPKPDKDLTGNYRPISLMNIDAKKLKILAGQIQQLIKMITQHDQVRFIKEMQGWFHIQMSIDVIIYHINRMKGKKHMITSIDKKKHLTKIQHPFMVKTLCKLGRKGNFLNLIKTSIKTHSXQHNSKTLKIFPLISXKFLISPLLFNIILEGLARAIRQEKEIKXIQIGRSKTTFAENMVLYIKNPKESTKXFRLIXKFSNVAGCKINTQKSKKNLRGNXRQFPFTITXKRIKYLEINLTKKVQDLDTEKYKTLLKEIKEDLNKWKNILCWQVGRLNIVKMALLPKLVYRFNTIPIKIPVTLFTETEKLTLEFIWGLQVNXRYSSLFKTILNKNKVEGLTFSNFKIYCKATSIKTVLCWYKNIXSNRVEWKVQKQITPIHLWSIDFWPRGSRTIQXRKNSVFNXXCXDKXIFTCKRMNLYLYFIPYIKINSRXIKDPKCKSVNPIKLXEENTGINLHDLGFGNGFLDMAPKAQATTAKKKKK

SEQ ID NO: 14608 - protein, 191 aa, Homo sapiens
  misc_feature (1)...(191): Xaa = X or * as defined in Table 2
KKIKNIKGSIQQEGLTVVNMYAPNDKPSTYMKQKLTXLKGEDNSTLIVGVFNITISVVDRTSQYLSKEIXDFHNTINQLDLTTIYRTLYPTMKYTFFSSIHRINSKIGHKLSLNXFXKTANIFPDHNGMNLVIIPKKKTGKFKNHRNXHTLNHXIKKETTRHWLKITPRLWPWQRVRFGAQSLQGPQLTAR

SEQ ID NO: 14609 - protein, 120 aa, Homo sapiens
  DOMAIN (38)..(55): GTPase-activator protein for Rho-like GTPases domain identified by eMATRIX, accession number PF00620B, p-value=5.286e- 09, raw score of 14.20
  misc_feature (1)...(120): Xaa = X or * as defined in Table 2
QRKACAPRAWSGDPSACRPSVRSXGSTTXGKPVNFDDYGDIYIPAVNLKTFLRELAESLLTFQAYDQILGITCEYLPWRRSGGLSPHMLSLIYWPMVRLWGGRGDVYPSCYCCHMALYGM

SEQ ID NO: 14610 - protein, 297 aa, Homo sapiens
  DOMAIN (112)..(132): ALPHA-1C ADRENERGIC RECEPTOR SIGNATURE domain identified by eMATRIX, accession number PR00557F, p-value=7.848e-09, raw score of 18.32
  misc_feature (1)...(297): Xaa = X or * as defined in Table 2
SISSQQTXSSWAPCYRSLPASTWASSLCSSSSLSISFSFSSVYSSPPGSSTPLASILSAFFXPLDFSSLASVSSLLPSLNLTFVSWLPPASPLSSLAFPASTLVSGLPSASSLMSSLPPGSACLSSPTSQHACSSSTLSQSLPSTSCCLSLQTPXTLPDWGFRSQKGTXVSXALRKTSSPFSSSTSGLGPAESREQQLGAKTNCASSRDRSSRCGSTENSSTXGPTPRSSSRXPIPGSSSPGEKAAPAASAWAASPSSAPTHSGYELLESSRKEKESCTSWDSESSRAGAKSSGPES

SEQ ID NO: 14611 - protein, 189 aa, Homo sapiens
  misc_feature (1)...(189): Xaa = X or * as defined in Table 2
ARCRQAREDGRLVQRLCRRGHFVPLQHRRGAQERAPGIAHSSCAAEPRPLSLRTDISSALVWPRASCARSCPEMGPPNLKWASGAXTLEECPPLSGSPRKNLDXPPGLEEPSRLEGGTPSSALLKGPAPTYLPPYALEDLPKPTSAVQHSPSTYPPHVLPIPPTPSSWRVVAVGALCSRQDNLHDQPRL

SEQ ID NO: 14612 - protein, 120 aa, Homo sapiens
HLSVKLKLKFWEHDMLQGQKEWIISIPLLLPHPLLQQNPHQPPHNPSQGQPYLHGPLKTRLPPSPHPRTSEQRHAWHTSGQTCGPGEPRPQQWLWCCSACTQLSVPWPGLHQAPQWEAGS

SEQ ID NO: 14613 - protein, 54 aa, Homo sapiens
  misc_feature (1)...(54): Xaa = X or * as defined in Table 2
KRKKILRINKTKSXFFEKINKIYKMLTHLRRDKRQKKSEIKKGDITTDTTEMKK

SEQ ID NO: 14614 - protein, 132 aa, Homo sapiens
  misc_feature (1)...(132): Xaa = X or * as defined in Table 2
PRVRNHPIQKWAKKGLDSHLSKEGPQAAISHMKRCPASPATREVQIRATGETHLRGCGNIGTLTRCXWGCKLLQPLWKPVWWFLRSLSIGLRCDPVATPLLSVWPQACKPGTQRDLHTTVFTAALFTVAEGQ

SEQ ID NO: 14615 - protein, 113 aa, Homo sapiens
  DOMAIN (22)..(51): Fructose-1-6-bisphosphatase proteins domain identified by eMATRIX, accession number BL00124B, p-value=6.077e-24, raw score of 12.52
  DOMAIN (8)..(50): Fructose-1-6-bisphosphatase domain identified by PFam, accession name FBPase, E-value=1.7e-17, PFam score of 65.2
  misc_feature (1)...(113): Xaa = X or * as defined in Table 2
DTRTHVAEEDKLAIIVEPEKRGKYVVWFDPLDGSSNIDCLVSVATIFGFYITNSSDXPSFNHALSTXRNLYLVSLPFHLAFLSTFHLSFLFFFLSFLSLFSYLFFLFSSFFSS

SEQ ID NO: 14616 - protein, 115 aa, Homo sapiens; identical to SEQ ID NO: 14518
  DOMAIN (3)..(31): !!!! PROTEIN ALU SUBFAMILY WARNING ENTRY NUCLEAR PHOSPHO domain identified by eMATRIX, accession number PD02454B, p-value= 5.808e-15, raw score of 11.61
  misc_feature (1)...(115): Xaa = X or * as defined in Table 2

SEQ ID NO: 14617 - protein, 142 aa, Homo sapiens
  DOMAIN (25)..(57): kw TRANSCRIPTASE REVERSE II ORF2 domain identified by eMATRIX, accession number DM01354J, p-value=1.628e-14, raw score of 15.12
  misc_feature (1)...(142): Xaa = X or * as defined in Table 2
EYYRFLEAKENRTATYXNLMDHAAKAELRGKFISIYAYIKKLEKFQIKNLTMQSKKLEKFXIKKSSNVFQRARKEQTKPQISQRKXISEKEXTKLRLNQCHKKSLKQPLLSXTKKDQNKXMRKEKGDIKLSGRVGRPEYLQT

SEQ ID NO: 14618 - protein, 135 aa, Homo sapiens
  misc_feature (1)...(135): Xaa = X or * as defined in Table 2
CPTSTSTSWTMWGPACREHLXPLPTFPPGQQPNTLPRPTLRPSPXTPTSACSRPXPAVPSRPSHPSHLPPSCPPQFTFNVPHLXXGGPHPTHNLPPNPCPALLQLPGFSTLPRLSPXTPPPTPPICHCVSRFLAP

SEQ ID NO: 14619 - protein, 82 aa, Homo sapiens
  misc_feature (1)...(82): Xaa = X or * as defined in Table 2
CREEDDDLVESEDSXQWGESLKRVSFTLLDDEATEDAGDLNVKKNSDEVKSFEKRQEKESAXVGRKMMTWLKVKTVNNGEKA

SEQ ID NO: 14620 - protein, 100 aa, Homo sapiens
  DOMAIN (8)..(49): kw TRANSCRIPTASE REVERSE II ORF2 domain identified by eMATRIX, accession number DM01354I, p-value=5.571e-23, raw score of 15.55
  misc_feature (1)...(100): Xaa = X or * as defined in Table 2
KFKNMWKLNDTLLNNHWVKEEIKKEIRKYLKRNENKNTTYQNLXDSAKPVLREFVVINAYIKIEEGSYISNLTLYLKDLEKEIKAKVNRRKDIRITEEIN

SEQ ID NO: 14621 - protein, 267 aa, Homo sapiens
  misc_feature (1)...(267): Xaa = X or * as defined in Table 2
VCRRWSGGLARRFGSGCCCSSCPQRRAARRSQVQNGKYLFDQINRSLENYEPCSSQNCSCYHGVIEEDLTPFRGGISRKMMAEVVRRKLGTHYQITKNRLYRENDCMFPSRCSGVEHFILEVIGRLPDMEMVINVRDYPQVPXMDGACHPSPSPSVRHQSDHDIMYPAWTFWEWGTCCLANLSYRSWTEGPLQRRSGKVSTQWPWKKKNSTAYFRGSRTSPERDPLILLSRKNPKLVDAEYTKNQAWKSMKDTLGKPAAKDVHLVDH

SEQ ID NO: 14622 - protein, 134 aa, Homo sapiens
  misc_feature (1)...(134): Xaa = X or * as defined in Table 2
IFSHYFFQKFLRLPFIMFIMHLLGCKVDLFIFQCFFHLVFYFGLFYYLKLFCYTFKFTNCFLYSFSFTVHLIXYIFPSDIMFLYVEVXFKSFFXRYLPLCHVHAFISFLNILISLFSSXXXLTIFYCPYLLFYH

SEQ ID NO: 14623 - protein, 74 aa, Homo sapiens
  misc_feature (1)...(74): Xaa = X or * as defined in Table 2
IFLPEKKLYKLEKWDRAFDNTXNFXTXKIHTGEKSXKCKKWDRAFKGWPHFIIGKIVHTEKNFYKGEQCGKTFN

SEQ ID NO: 14624 - protein, 191 aa, Homo sapiens
  DOMAIN (105)..(140): 2-oxo acid dehydrogenases acyltransferase component lipoyl bi domain identified by eMATRIX, accession number BL00189A, p-value= 2.895e-20, raw score of 19.58
  DOMAIN (91)..(164): Biotin-requiring enzymes domain identified by PFam, accession name biotin_lipoyl, E-value=2.5e-09, PFam score of 44.4
  misc_feature (1)...(191): Xaa = X or * as defined in Table 2
AVEMYLVVCGTVAISRVRMSAVCVLRTWSRNAGQLICFTVFQPCSNVHVLKGPNYVCFFGYPSFKYSHPHNFVKTINAVCGQLVQFRFPDTEEGIRKVTVKCYVKEGDTVSQFDNIGKVQSDKASVTIASPYDGVIRKLXHSLDDIAYVGKPLVNIETEALKGTVNLFYQIDYCPPFVIGSQLKVTFKKKK

SEQ ID NO: 14625 - protein, 143 aa, Homo sapiens; identical to SEQ ID NO: 8541
  DOMAIN (21)..(43): Globins profile domain identified by eMATRIX, accession number BL01033A, p-value=2.929e-17, raw score of 16.94
  DOMAIN (10)..(143): Globin domain identified by PFam, accession name globin, E- value=4.3e-55, PFam score of 196.4

SEQ ID NO: 14626 - protein, 96 aa, Homo sapiens
  misc_feature (1)...(96): Xaa = X or * as defined in Table 2
IILTEKKLYKLEKCGQGFXQHLKLLNIKNHTGEKSXKCKKWDRAFKGWPHFIIGKIVHTEKNFYKGEQGGKTFNEGSHLIAQESIYTXKKLSKYKD

SEQ ID NO: 14627 - protein, 50 aa, Homo sapiens
  misc_feature (1)...(50): Xaa = X or * as defined in Table 2
KTFRSQKKKXIHWDYIKILNFCARKNTISKVKRQPTEXEKIFANHISAXG

SEQ ID NO: 14628 - protein, 137 aa, Homo sapiens
  misc_feature (1)...(137): Xaa = X or * as defined in Table 2
FLRXIGSHSVTQAGVLWRDFGSLQPLPPGLKLFSCLSFLSSXDYRRVPPCLAKFCIFSVRRGFAMLARLVLNSXLXVVCPPCHVDLYNXSASQSAGIKGVSHHTWPHKYHLKNLNVFSYQSKSTVNNQLSSQILLLN

SEQ ID NO: 14629 - protein, 157 aa, Homo sapiens
PESIKRAKEMDLVGLGLHPLFSSRFEEEELQRLRLVDSIKNYRSRADIFSEVVGRKRQRSGPNRGAKRRREEARQRDQEFYIPYRPKDFDSERGLSISGEGGAFEQQAAGAVLDLMGDEAQNLTRGRQQLKWDRKKKRFVGQSGQEDKKKIKTESGR

SEQ ID NO: 14630 - protein, 348 aa, Homo sapiens
  DOMAIN (73)..(119): DEAD-box subfamily ATP-dependent helicases proteins domain identified by eMATRIX, accession number BL00039D, p-value=5.950e- 29, raw score of 21.67
  DOMAIN (34)..(115): Helicases conserved C-terminal domain identified by PFam, accession name helicase_C, E-value=3.7e-22, PFam score of 87.1
REDTKAAVLLHLLHNVVRPQDQTVVFVATKHHAEYLTELLTTQRVSCAHIYSALDPTARKINLAKFTLGKCSTLIVTDLAARGLDIPLLDNVINYSFPAKGKLFLHRVGRVARAGRSGTAYSLVAPDEIPYMQDLHLFLGPLPHPRPTPQGALRVWAGVDGHAGVGVPQSVVDEEDSGLQSTLEASLELRGLARVADNAQQQYVRSRPAPSPESIKRAKEMDLVGLGLHPLFSSRFEEEELQLLDLVNSIKNYRSRATIFEINASSRDLCSQVMRAKRQKDRKAIARFQQGQQGRQEQQEGPVGPAPSRPALQEKQPEKEEEEEAGEKCEDIFSEVGGRKRQRSGPNR

SEQ ID NO: 14631 - protein, 290 aa, Homo sapiens
  misc_feature (1)...(290): Xaa = X or * as defined in Table 2
PKSWNGPPHPPGHRHSRSHSNFSGCSVDEERSRTSKDSSSPVNDHRGRQXMRXKNPFAASSRSTSSSSSSSSPSPPLWSTAGRTPTTRSGPSPALDKVQIYMEHLLATASTEPAGSAHVPGHLFRAEXVLPALXGRALLGTPVTNNLLGEIAKPSLSQSKRLKAASAAKYPHDVVNHLSCDEARNHYGRRGQPHPPHPRTKXKNGSPTPRSCRARCCSTXVSPRRTRRAPGDPLVLPRPXGPSPGPLNTSVDSSQKPASNPGDVQNHPGGLLVGNCNSEPGAPSAESFAV

SEQ ID NO: 14632 - protein, 112 aa, Homo sapiens
  misc_feature (1)...(112): Xaa = X or * as defined in Table 2
KLKVKGGKRYRMLTLIKRKXHXIKIQNSCVFLYTSNXELENKIFGRYVSFMIAXKIKSLGIILMKDVXNLHSEDYERLLTKIKDDSNKWTDMQFTRIRXYHKMLILKXPIIY

SEQ ID NO: 14633 - protein, 72 aa, Homo sapiens
  DOMAIN (15)..(25): P450 SUPERFAMILY SIGNATURE domain identified by eMATRIX, accession number PR00385D, p-value=1.000e-08, raw score of 13.11
  misc_feature (1)...(72): Xaa = X or * as defined in Table 2
LHDSNTRSPQFQKSLGFSTGRHRCPVXEGLRSVTQAGVQWPIHSSLQPRPPGLQSDPPASACQAARTLCRWY

SEQ ID NO: 14634 - protein, 80 aa, Homo sapiens
  misc_feature (1)...(80): Xaa = X or * as defined in Table 2
LVCLSKSECLQPLFYHHLTLKNCQFHLCRILLHPQCXKQALRHGKACPLCHCCSHAALYMICLAKEDXKTFDPQELMYSL

SEQ ID NO: 14635 - protein, 163 aa, Homo sapiens
  DOMAIN (13)..(34): M-PHASE INDUCER PHOSPHATASE SIGNATURE domain identified by eMATRIX, accession number PR00716C, p-value=1.489e-09, raw score of 17.65
  misc_feature (1)...(163): Xaa = X or * as defined in Table 2
ANQLQGEGVRFFVVDCRPAEQYGAGHLSTAFHLDSDLMLQNPSEFDTAILXSLLEAQKQSIESGSIAGGEHLCFMGSGREEEDMYMNMVLAHFLQKNTEYVSIASGGFMALQHHLADINVDGPENGYGHWIASTSRSRSSINSVDGESPKWLCKLRWILKHQV

SEQ ID NO: 14636 - protein, 180 aa, Homo sapiens
  DOMAIN (31)..(53): Globins profile domain identified by eMATRIX, accession number BL01033A, p-value=2.929e-17, raw score of 16.94
  DOMAIN (9)..(160): Globin domain identified by PFam, accession name globin, E- value=1.2e-49, PFam score of 177.6
APSPDAMGHFTEEDKATITSLWGKVNVEDAGGETLGRLLVVYPWTQRFFDSFGNLSSASAIMGNTPKVKAHGKKVLTSLGDAIKHLDDLKGTFAQLSELHCDKLHVDPENFKLLGNVLVTVLAIHFGKEFTPEVQASWQKMAEDVTGVASALASTYPLSSLAHDSELSRDRLLFCKQIKI

SEQ ID NO: 14637 - protein, 473 aa, Homo sapiens
  DOMAIN (118)..(159): ATP-dependent serine proteases lon family, serine active sit. domain identified by eMATRIX, accession number BL01046D, p-value= 4.938e-35, raw score of 19.61
  DOMAIN (36)..(237): ATPases associated with various cellular act domain identified by PFam, accession name AAA, E-value=1.4e-17, PFam score of 71.8
  misc_feature (1)...(473): Xaa = X or * as defined in Table 2
ARILLDNDHYAMEKLKKRVLEYLAVRQLKNNLKGPILCFVGPPGVGKTSVGRSVAKTLGREFHRIALGGVCDQSDIRGHRRTYVGSMPGRIINGLKTVGVNNPVFLLDEVDKLGKSLQGDPAAALLXEVLDPEQNHNFTDHYLNVAFDLSQVLFIATANTLATIPAALLDRMEIIQVPGYTQEEKIEIAHRHLIPKQLEQHGLTPQQIQIPQVTTFXIITRYTREAGVRSLDRNLGPLCRAVAVKVAXGQRTEPIWTVLMXLREKVAENTSXKMKNLNLSRDTTDLALPPEMPILIDFHALKDILGPPMYEMEVSQRLSQPGVAIGLAWTPLGGEIIFVEASRLDGEGQLTLTGPSSGTVMKESAHLAISWLRKQRKESTKLTNAFGSFDLLDNTDIHLHFPAGAVTKDGPSCWEVTISNLSRPQLFSGRLVRSDVAMTGEITLRGLALPVGGIKDKVLAAHRAGLKQVIIPR

SEQ ID NO: 14638 - protein, 71 aa, Homo sapiens
  DOMAIN (8)..(25): ENDOPEPTIDASE LA (LON) SERINE PROTEASE (S16) SIGNATURE domain identified by eMATRIX, accession number PR00830B, p-value=7.429e- 13, raw score of 14.73
  misc_feature (1)...(71): Xaa = X or * as defined in Table 2
VSQRLSQPGVAIGLAWTPLGGEIMFVEASRMDGEGQLTLTGQLGDVMKESAHLAIQLGSAATQRSTQLTNX

SEQ ID NO: 14639 - protein, 136 aa, Homo sapiens
  DOMAIN (10)..(57): kw TRANSCRIPTASE REVERSE II ORF2 domain identified by eMATRIX, accession number DM01354V, p-value=5.019e-09, raw score of 12.97
  misc_feature (1)...(136): Xaa = X or * as defined in Table 2
HHFLTCRIKNKINYTIATKTIKYLRINLRNFXSLTKPKLLKDIKVDLNKWKNISYSWLRXFKLTNISVLPILIYNKIPIXKINTFFIKLDKLMPKFIXKNKHVKIGRKITKKKSYKGILTLSDIKTYYKVSIIKTV

SEQ ID NO: 14640 - protein, 140 aa, Homo sapiens
  misc_feature (1)...(140): Xaa = X or * as defined in Table 2
SFPLPFPLPPCSSPQGPQLLRKAITRPWPGTCPYPASTQVGEFTLRTRPQLSVGVXEEGCPYPSPADSPMSEDPGAAPPHHPRSPLXRNRCSSKGKTAVFAWPASHLASPLQPTGLPGKRNNMLSVPNNTPQPDAWVAPE

SEQ ID NO: 14641 - protein, 138 aa, Homo sapiens
  misc_feature (1)...(138): Xaa = X or * as defined in Table 2
ILSTLFQICHCLWSSQLLLTSHCQYHYCCSSKNKNNLAWLLLKLFLYNLEAXFIHLAVIFLYLSCLGFTALYEFVVCFLLLVLRSYSVLLFLSFLFWNFSTHILELLCPICLLNFVLLFMYFSFSVLQFGYFLFLCLQ

SEQ ID NO: 14642 - protein, 136 aa, Homo sapiens
  misc_feature (1)...(136): Xaa = X or * as defined in Table 2
RQGLTLSHGPEVQWHDLSSLQPLPPGLKKIFPPSASRVAGNTDVHHHAWLVFFPFFVRRGFAIVAQAVLQNPGLQAICPPMASPKCWDYRRGPPHPAQEXEHFLRSLPSTGESYFGELXHISTRKIKILVHFEETN

SEQ ID NO: 14643 - protein, 110 aa, Homo sapiens
  misc_feature (1)...(110): Xaa = X or * as defined in Table 2
TEPALSPRLECSGTISAHCKLRLPGFMLFSCLSLPSSWDYRRPPPHPAGFFVFLSRRTGFHCRLARDGLDLLTSXSARLGFPKCWDYRRDDPMPGPVSFNRMENLMETVD

SEQ ID NO: 14644 - protein, 76 aa, Homo sapiens
  misc_feature (1)...(76): Xaa = X or * as defined in Table 2
AASTPRPLRFLPSPTRGLVPNXRPRRRRTSSAAITPAPEPAPTSARPTRSNTHRRLSPWSSRPVTEEMQSAAKHNG

SEQ ID NO: 14645 - protein, 128 aa, Homo sapiens
  DOMAIN (25)..(64): kw TRANSCRIPTASE REVERSE II ORF2 domain identified by eMATRIX, accession number DM01354X, p-value=6.600e-10, raw score of 13.86
  misc_feature (1)...(128): Xaa = X or * as defined in Table 2
IPWSRVGXNHPVKNAHLPKAVSKFKTISIKKPPLFFPRMEKTILKFLWDSSSSSSSLPVXSSSSSSSSSSSSSFSSSSSSSSSSSSSSSSSSSSSSSSSSSSSSSSSPTHKIKPNTYRQLIFDKANKN

SEQ ID NO: 14646 - protein, 135 aa, Homo sapiens
  misc_feature (1)...(135): Xaa = X or * as defined in Table 2
DRKEERLRSPRSGAAATMSSGGKGVAEWDPLPCLDPELWDQFDNLENHSLEKFIISAKERTEIELSYTKQLRNLLKTCQPKRNWKEKEYITXNSPSLPVNKMSDHARQHXVIFFEVLNFQITVELQGHVQNQKQE

SEQ ID NO: 14647 - protein, 86 aa, Homo sapiens
  misc_feature (1)...(86): Xaa = X or * as defined in Table 2
AGQPGPEGIQLGXPQIRDKGDQMGPHPCWXVCGTLTPNTSFXVFCCVAGRDGAPGVKAHFPAAQKPWDGGFPGPXSAGVGPPPIPR

SEQ ID NO: 14648 - protein, 147 aa, Homo sapiens
  misc_feature (1)...(147): Xaa = X or * as defined in Table 2
DPRVRPGTRGPRSGTAGGETTWEGPFGVIVRVLMFLSYELRAAELGEVGAGGPRGARRPSQTETAAXPASRFVRGLGPQTLRPTSPGPRRSRPLLGDEPPRRRVGGASFPPTRNGSGAWALWRRPCWECSSRSFLRTTKLFLFFGFG

SEQ ID NO: 14649 - protein, 659 aa, Homo sapiens
  DOMAIN (460)..(491): Protein kinases ATP-binding region proteins domain identified by eMATRIX, accession number BL00107A, p-value=1.474e-18, raw score of 18.39
  DOMAIN (59)..(134): Raf-like Ras-binding domain identified by PFam, accession name RBD, E-value=1.4e-39, PFam score of 145.0
  misc_feature (1)...(659): Xaa = X or * as defined in Table 2
AASMEHIQGAWKTISNGFGFKDAVFDGSSCISPTIVQQFGYQRRASDDGKLTDPFXTSNTIRVFLPNKQRTVVNVRNGMSLHDCLMKALKVRGLQPECCAVFRLLHEHKGKKARLDWNTDAASLIGEELQVDFLDHVPLTTHNFARKTFLKLAFCDICQKFLLNGFRCQTCGYKFHEHCSTKVPTMCVDWSNIRQLLLFPNSTIGDSGVPALPSLTMRRMRESVSRMPVSSQHRYSTPHAFTFNTSSPSSEGSLSQRQRSTSTPNVHMVSTTLPVDSRMIEDAIRSHSESASPSALSSSPNNLSPTGWSQPKTPVPAQRERAPVSGTQEKNKIRPRGQRDSSYYWEIEASEVMLSTRIGSGSFGTVYKGKWHVNVAVKILKVVDPTPEQFQAFRNEVAVLRKTRHVNILLFMGYMTKDNLAIVTQWCEGSSLYKHLHVQETKFQMFQLIDIARQTAQGMDYLHAKNIIHRDMKSNNIFLHEGLTSXKFGDFGFATVKSRWSGSQQVEQPTGSVLWMAPEVIRMQDNNPFSFQSDVYSYGHRICMELDGRGELPYSSHINNRGFRSIFHGWGRGYASPDLSKLYKNCPKAMKRLVADCVKKVKEERPLFPQILASIELLQHSLPKINRSASEPSLHRAAHTEDINACTLTSSPRLAGLPS

SEQ ID NO: 14650 - protein, 139 aa, Homo sapiens
  DOMAIN (40)..(87): kw TRANSCRIPTASE REVERSE II ORF2 domain identified by eMATRIX, accession number DM01354V, p-value=8.777e-09, raw score of 12.97
  misc_feature (1)...(139): Xaa = X or * as defined in Table 2
EPQWIQALMPEKEPARQSRGGALRTDSSEPSRNEVKKTISFIILAKRTYLEIYATQDAXNLCTEKYKIFLKGIKEYRTKWKDILQSWITRHNVKMAKLPKFIYSFTICIKMPLSFYKLILIFMRKYKGCRIANTIXRER

SEQ ID NO: 14651 - protein, 72 aa, Homo sapiens
  DOMAIN (41)..(62): kw TRANSCRIPTASE REVERSE II ORF2 domain identified by eMATRIX, accession number DM01354S, p-value=1.111e-13, raw score of 11.61
  misc_feature (1)...(72): Xaa = X or * as defined in Table 2
DAWVTSTNADKEFEKIQHPLMIKLSSKXVYNMSYIYPLFKIIKGIYDKSLVNIILNVEKLKAFFLRTGTRER

SEQ ID NO: 14652 - protein, 130 aa, Homo sapiens
  DOMAIN (41)..(54): LUTEOVIRUS ORF6 PROTEIN SIGNATURE domain identified by eMATRIX, accession number PR00910A, p-value=2.821e-09, raw score of 2.51
  misc_feature (1)...(130): Xaa = X or * as defined in Table 2
GRQPRWRLWGQLLSSGRRPLEPGWHRPSRGERGHHASFPEPGPCPGPQQRPQPGXVPVPEPPPKGGPEPRSSGRKASGPSAQPPPAGDGARERRQSQQLPEEDCMQLNPSFKGIAFNSLLAIDICMSKRL

SEQ ID NO: 14653 - protein, 130 aa, Homo sapiens
  DOMAIN (59)..(114): kw TRANSCRIPTASE REVERSE II ORF2 domain identified by eMATRIX, accession number DM01354Q, p-value=1.409e-18, raw score of 9.23
  misc_feature (1)...(130): Xaa = X or * as defined in Table 2
KNQEQESEETLPNLFYKASITLIPKLDTQKXKKRKEKKRKKKKENXKPITHRNIYAKILNKILAHQIQQYIGKIIHHDQVGCIPGAFDKIQYRCMIRTLQKMGIEGTHLNIIKAIYIRPTDSIIENREKP

SEQ ID NO: 14654 - protein, 45 aa, Homo sapiens
  misc_feature (1)...(45): Xaa = X or * as defined in Table 2
SKAKINGWDYIXLKCWYTAKKAISGVKRQPTEWEKIFANXSSDRR

SEQ ID NO: 14655 - protein, 177 aa, Homo sapiens
  misc_feature (1)...(177): Xaa = X or * as defined in Table 2
GGWDFAPAEGRERLAPCQIWDPSCLPTHWXPLSGLLSRPPPGTQSPQLSPYSCAKSWCPCPSLSPGSPMNXPSVPRTTGPSHPEPSAHGSHTSPIVATTERAPERISGGDSLGLSPSGLEGVNREPLFTPPSSSGSSVSLMSSTPPPAGHSAAXSPQPGRCSGPAQGQATSRSVRGP

SEQ ID NO: 14656 - protein, 746 aa, Homo sapiens
  misc_feature (1)...(746): Xaa = X or * as defined in Table 2
MEERKGHKEIHLRRLKVRILSVRMSAIKESPRLLIGNQEPLKQLKQESKMNRYVFNTDYSGCIRLIQSRLSHFPESSGQQNPKPYMRKFKTPLMIAEEKYRQQKEEIEKQKQESSYYNIVKTQSQNQHITEVEKEMPLQKTNEEVSLSGIDSECTVVQPSPGSQSNARILGVCSDNQLSTTSPETVAAKRLHHVLAASEDKDKMKKEVLQSSRDIMQSKSACEIKQSHQECSTQQTQQKKYLEQLHLPQSKPISPNFKQSEIDVQTFTKKQYLKTKKTEASTECSHKQSLAERHYQLPKKEKRVTVQLPTESIQKNQEDKLKMVPRKQREFSGSDRGKLPGSEEKNQGPSMIGRKEERLITERKHEHLKNKSAPKVVKQKVIDAHLDSQTQNFQQTQNQTAESKAEHKKLPQPYNSLQEEKCLEVKGIQEKQVFSNTKDSKQEITQNKSFFSSVKESQRDDGKGALNIVEFLRKREELQQILSRVKQFEAEPNKSGLKTFQTLLNTIPGWLISEDKREYAVHIAMENNLEKVKEEITHIKTQAEDMLVSYENIIQTAMMSSKTGKPANGAALVSTKTSPKVSNVHVSNNENSEQKENXIAKEKTVQHQVAAHDEATVRSHVKTHQEIKLDDSNIPLPLXKHSPPSPTFITIESTARRTENPTKNELSQSPKKDSYVEPPPRRPMSQKSEIHRANTSPSPPRSRSEQLVRLKDTTAKLSKGAIPCPAATPVPIVEKRSEIIMSPATL

SEQ ID NO: 14657 - protein, 62 aa, Homo sapiens
MPWISEGRATRPCLRVPSARRGDEGLHQRATANSVYKSRNTWLCWICKPPQSSSPKISEKRF

SEQ ID NO: 14658 - protein, 40 aa, Homo sapiens
  misc_feature (1)...(40): Xaa = X or * as defined in Table 2
STAPGSGRQRTVSEEPXPHSTEDGQRGQWGGTSLQHPAQD

SEQ ID NO: 14659 - protein, 205 aa, Homo sapiens
  misc_feature (1)...(205): Xaa = X or * as defined in Table 2
LVRVFPWREDKVWWHCQECRPKRXKSKPGLSGPVAPGHSWDSTETTEATGLLLIPGPTRRPPTLYHTPCCLSVPRWCRPSSPLLAEGTRRQGLVALPSLIHGIQPMGLEVWGLASPPRPGRKWHRXKDKMATQALSVCRAXTCILPPSTKTSRPRPHSTPRGPAPTTVQRNSRRVNKGSPESPLPRPGLPVSEPHVAGTRTARDG

SEQ ID NO: 14660 - protein, 144 aa, Homo sapiens
  misc_feature (1)...(144): Xaa = X or * as defined in Table 2
FEDIKXVIGKVKKMMSKQRGNINKGKIIKRNQKEIVELKSTVTKIKNLLGGFKNRLXQTDKXISYFEDTTVEISQSGKQSSSRLEGREQSLKNLWNTIKLTRVYTVGVSEKEKKEQIVXKISAGNFSNLIKNMNINIQEAQRTP

SEQ ID NO: 14661 - protein, 156 aa, Homo sapiens
  misc_feature (1)...(156): Xaa = X or * as defined in Table 2
PRPDRDSEAPGADGAGPRGALPVPGGHGQDPAEDGPGVHAGGARDGGPDPARGAYPPMPSTRGCRKGSLANLPPVGFQYVHPFFXFPGVTAKIQRRMDQVFTLAVRETEALIPPEVPTRQCPAHEAVGKVHWLICHSWFSICPSLFLISRAQYFYP

SEQ ID NO: 14662 - protein, 132 aa, Homo sapiens
  DOMAIN (28)..(74): kw TRANSCRIPTASE REVERSE II ORF2 domain identified by eMATRIX, accession number DM01354O, p-value=7.833e-17, raw score of 8.73
  misc_feature (1)...(132): Xaa = X or * as defined in Table 2
GSPAPGLPKGWGFRGGPPGPGKFVFFKLPKGGFPGAEIFLGEFFQRGKKGLGPIFPPVFLKTEEGGTLSNSFFKGRVFLVFKPKAGSSSSSSSPNYKPIYLNNTDTKFFNNMLANRIXQCIKEVMQYDRTRG

SEQ ID NO: 14663 - protein, 79 aa, Homo sapiens
  misc_feature (1)...(79): Xaa = X or * as defined in Table 2
DRGLCLPTLEVQWAPILGSLQPPPPGFKQFSCLSLPNSWDYRCMPTCPANFFVFFCIFXXSRFHQVGQAGVQLLTSSDL

SEQ ID NO: 14664 - protein, 191 aa, Homo sapiens
  misc_feature (1)...(191): Xaa = X or * as defined in Table 2
AGQVGQLGFPGWAGGEGRGRPPLLXLSLPGRQLPREEGLTSVSGHPCWPDSFPGLPGVEKPQGNLAGGALLPKLQRQSGPGNHKTLPISRGPADPGAVPVCHSTVGPRGXHSLALHTVPPEKFNIYFFTCPENSSFNSLPLPFRSSLEGIQAGVSSAWGHSAGPGTLGLSGDGRQRQARRFSLHSCLPCSP

SEQ ID NO: 14665 - protein, 134 aa, Homo sapiens
  DOMAIN (49)..(92): kw TRANSCRIPTASE REVERSE II ORF2 domain identified by eMATRIX, accession number DM01354T, p-value=2.645e-15, raw score of 9.48
  misc_feature (1)...(134): Xaa = X or * as defined in Table 2
GEKTDKIQHPLMIKTLTNLGIEKAYISIIKVIHNRPMACIIINGAKVKAFPVRSERQRCSPSPLLFNIGLKVPVRAIEKEKEMKGIXIGKKEIKLCLSGNDMTLYLKHPKNSTKTIRTDTFSKVAGYKNTDAWV

SEQ ID NO: 14666 - protein, 53 aa, Homo sapiens
  misc_feature (1)...(53): Xaa = X or * as defined in Table 2
GNLGETLMDIGLGKEFMTKTSKAQATKPKIDWDLNXKSFCTDTNIMHMVLIYL

SEQ ID NO: 14667 - protein, 208 aa, Homo sapiens
  misc_feature (1)...(208): Xaa = X or * as defined in Table 2
DIYYNCFGFASRKTDCLSTRIPCFERTSSNSXTQNLTALFXIKYDCATVQACRSRNKWEVRDALNKFSGTNSIFYIIKRFYIYIYIFFFFFFFETESHSVAQAGMQWRNLGSLPAPPPGFTPFFCPSLLKWLGPTRRPPRQTLANFFVLLVETGFTMLARMVLISXPRDPPASASQSAEITGVSHCTRLKKIRFAKGHVEFFFESHVE

SEQ ID NO: 14668 - protein, 104 aa, Homo sapiens
  misc_feature (1)...(104): Xaa = X or * as defined in Table 2
ENGWCWIATYGKRKLDSYLSLHARVNSRWDLDLGTETMEILEENLGEVLLDIGLGKEFMTKTPKADSTEIKINRXDSYIWKNENWIPISHYMQELTQEGLGSRN

SEQ ID NO: 14669 - protein, 288 aa, Homo sapiens
  misc_feature (1)...(288): Xaa = X or * as defined in Table 2
TLAKWWTRREQRSQLSTQASSYHQWQRVGACGQAARMRSAPAVIPTRPGEFVHQSLESASNSRLQPVTSTGHRSAPLEAGLLTGCVLMPGCSASQASMELHSWSPCPDGFCTYRVLRSCPLCNCSRPDGPEKENHGQEPEAAVRSQPEGPEGGTRAGRPEPGGGPHLQEPKASETHNPGIPSREGAAAQGHLQGSGTHVRGGKQPSAAGPGRIIARVLSGPPGPRARGRGCADGSXASPRARSSCRSGGRSRAAAPRRRRGGAGAARACARGCAGGXAGSAARGSSGR

SEQ ID NO: 14670 - protein, 120 aa, Homo sapiens
  misc_feature (1)...(120): Xaa = X or * as defined in Table 2
STHETFSKIDHMMSTSLSKIKETIVLSIPSSSSSSSSSSHSKSNLQNYTNTWKLNLLQNDFXVNNEIKMETXKFFEMNDNDTSYQSLWDTAKAVLRXNRKDHKLTTXHLKELQKHEQTQS

SEQ ID NO: 14671 - protein, 95 aa, Homo sapiens
  misc_feature (1)...(95): Xaa = X or * as defined in Table 2
IKKFRWGPKPPLKEPPGVSPDFPIINFGNPGPVPGKDFKFPNFSSSSPWGGRAPPVVPTTPGGXMGRFPXPPAFGVPRGGDGSPPPGAPKEGPLS

SEQ ID NO: 14672 - protein, 142 aa, Homo sapiens
  misc_feature (1)...(142): Xaa = X or * as defined in Table 2
FLRRVSLYCQAGVQWPTSVTEPPPPGFKXFSCLTLPSSWDYRRAPPRPAKFCIFMXRLYFTILARMVSISXPCEPPASASQSAGITGVSHRAGLVLFLNKPVTGLGFDSHHPYHSQISEKDPPPISSIFNKKSIHTNLLIPN

SEQ ID NO: 14673 - protein, 229 aa, Homo sapiens
  DOMAIN (159)..(174): WILM'S TUMOUR PROTEIN SIGNATURE domain identified by eMATRIX, accession number PR00049D, p-value=6.250e-12, raw score of 0.00
  misc_feature (1)...(229): Xaa = X or * as defined in Table 2
PGPPPEVRQHIRVPGTRTGRAAIWPGSFPVGFPLHRAQGRGQSPFPFPQGTKGLGLEWKGCCHAGAQETGSPLPIMVHFSGSWEMVSRGKPSSXQLEAXGRGRAPGLGSKAGPRLHQDTPASQCMWVCLNTPSRQRVRGPDTQGYVCVPLPPQPHAPRMNQGQLPPGAPPPPPPPSLVPKYFPPSQSSWDRKIPRLQAPPCPPRHGPPSAVTNALPNGPRLSAEAPWLG

SEQ ID NO: 14674 - protein, 201 aa, Homo sapiens
  misc_feature (1)...(201): Xaa = X or * as defined in Table 2
SGCSRRCPGPWACWTPQKGFRGGRKRRSGLWGLCCWCRPHSHRRAGCHHQDGECDRWGLLPRDHSRLWIFLRNYWHQLGGEXKANAGGSDRVYQFWGAGPPSAAPSGAAYLQHSTLNRGPSPREDASFTPVGWGTCTMSTRQRSPVTPWTASASXRXEATPVTAVTSMPAGAQSPRPPTMSSSASAAARTGCTWNGWFWAL

SEQ ID NO: 14675 - protein, 514 aa, Homo sapiens
  DOMAIN (43)..(82): Tau and MAP proteins tubulin-binding domain proteins domain identified by eMATRIX, accession number BL00229A, p-value=7.273e- 09, raw score of 23.57
  misc_feature (1)...(514): Xaa = X or * as defined in Table 2
GRYWRVVDHGRESRVSGPRFRPSFLAALPPGRHPWPWDAAAGGSPASXGGAAXSALGLSQPRPPGASDAAPDSTPAGVXTASSSALIPSRARXKGSGTLEETKSRPPHSHRSGPVDLSPRSSHSRDSTPVHGPYFRSAPDPGAPPRPSAGQSQLGGGSSGSPGNSIPCAFVQQXLERAXRSHSSPGSEHRRAXSGGLRQGVQGIEVFGLGHPPGGYSCGPQPQEKSPPPAHPLGVEIWCRGLYIGWKSHSPHPALAEDWQPVPPAAMAVGAPGLRRIQRTSRRWGQCPNEAGHAADPRDSGPPGNYQPVSLHILHMDPGTCXPEXQQHPRPPLXMAGKQWPCTXLDKGQSLGLAGSHQHQYCQWWXQQLQSHTSLCRSPPPRXRASASPCXASWGRSSAGAAGFRALGRXHLGTSLPGSAGSLPPCTAEPPADASPXLSPTVLAELGSEGASEECHSCPHGSPQSLSGSHRPAESQYHVERWKQDMGPISVKSPTPRRGPTSGSGLLRLARSSL

SEQ ID NO: 14676 - protein, 107 aa, Homo sapiens
  misc_feature (1)...(107): Xaa = X or * as defined in Table 2
MLARALDARFLRWCRRDQPLVYHSPXPPGASDAAPDSTPAGVXTASSSAPAGEKDANQMEWARRVPRAPPPGSPGPSLIPSRARXKGSGTLEENKSRPPTQSPFGAG

SEQ ID NO: 14677 - protein, 136 aa, Homo sapiens
  misc_feature (1)...(136): Xaa = X or * as defined in Table 2
LCAAVNRALDEGIPLTSALYYATVTLDQVRNILRSDTDVSMPLVEERHRMLYDTGKILLEKFGGCFLNCVRESENSAQKLMHSWAESCPSYRDVTLVEGKRASFYKRTQILVSYTCIVLEGKXDACLQDILSITML

SEQ ID NO: 14678 - protein, 110 aa, Homo sapiens
AGGPGLPCVPHLPAGARAWRCQQPPGAACCPGRRLPLPGKPSPGSSRSSRQRGQSCRTVSVLPPSSPGCRGSQVRPDLGPPKAEGCSPWGLRAESCGATGARVRCHRCVV

SEQ ID NO: 14679 - protein, 70 aa, Homo sapiens
  misc_feature (1)...(70): Xaa = X or * as defined in Table 2
VPSTVLDALHILFCLISFLKNKLGWCSGLTPVIPGLWEAEAGGLLESQEFGTRLVNMAKPCLYXKYKKLA

SEQ ID NO: 14680 - protein, 355 aa, Homo sapiens
  misc_feature (1)...(355): Xaa = X or * as defined in Table 2
EAGPGGQAARSQRGSSLGLVLPPLRLQRCGAPEGHASPTPAGPGAPNQLAAPWLLWPCAXPPPGLCYPAPPPPPPQKHPGLLPAPRALPSPRELPGEEPSAHPVHQGPSCRATRPASASFKSHSGEFRQGLISAAHILQELPGPAGENFQKVFNGAAGPAARHGPSSRSSCPCTHGTSGNREKPLSTKSKKNKKSAWQATTQAGGPGLPCVPHPAKQVLAHGDASKPPGAACCPGRRLPLPGKPSPGSSRSSRQRGQSCRTVSVLPPSSPGLPGTKVRPWXGHLASLVWPGPPGKSPGQSTRPVGTLKRGVHPLPQVVGQSRFAILVLFGRCQGEGRAGMLGTCCLLAKPEVTVA

SEQ ID NO: 14681 - protein, 136 aa, Homo sapiens
  misc_feature (1)...(136): Xaa = X or * as defined in Table 2
QKVCAHTCLRGTICXIFTHLCVLRGLCWLLGCEMCMMXMCKYVCMCEKCCTFVGRCMXVCVCAGDREHLAECVRGCVRHWCTRAXVRMCICVCTCLCVCVXVSGVCICKSPCVLCKSIVNCVXAXTHTWFCVHVCV

SEQ ID NO: 14682 - protein, 184 aa, Homo sapiens
  misc_feature (1)...(184): Xaa = X or * as defined in Table 2
STHLSLPKCWGLQAXATLAQPNSRSLLKYKFIYMSKGHYSVKVEKQPTEWGRKIFWQTMVSGXGGLESRIYKELLQLSNKKTNAXLKSGAKAQHRHFSREHTHMGQQHQQRCLIASLIREMQIQMTLRGYFTLIRMIITRKSDNNXCWQECAEIGTLLHYWWECEMVHGRGKIVWQFLKNIQLP

SEQ ID NO: 14683 - protein, 117 aa, Homo sapiens
  misc_feature (1)...(117): Xaa = X or * as defined in Table 2
SISNENFPTKESQGPETFTGEFYQTFIDLSPILLKLFQITDXAGTLPSSFYEISITIIPKPEXKSQENYSAMYLMNIDTKIFHKILATQIXPYINVIIHYDQVGFIPGMQSSFNVIN

SEQ ID NO: 14684 - protein, 69 aa, Homo sapiens
  misc_feature (1)...(69): Xaa = X or * as defined in Table 2
GRVDHTHPGLPRPLCPHSPDPPQRMXSHSAVGASGLADPYERIVVSXDGNSSSPNHQGDGASQTSGEQI

SEQ ID NO: 14685 - protein, 266 aa, Homo sapiens
  misc_feature (1)...(266): Xaa = X or * as defined in Table 2
QPRDPSSGTHHPDGDRGGQPAPICPRQGSCSHSPLEHAPCPILGPGSWPRWHLDLLSLLGDPKVGGPIACPPGSPPHAWTGPVACPGLGQPCSCTPILIPHPIPCQHPKAPGGHPLCSKLLTCLPATPAVPSQPGHHHPLFIMSGLMGAWPSPEAGPGVLPSWTTAEXGTRHWTHEEEAALGATDAVTSPPGFGRQVPAPRMPAWKCPCIRGLLHSLPSEKPLQVHRECVQPCEGLGPLAQTGAPQAQAWGPTDLSPQLPHRKHLK

SEQ ID NO: 14686 - protein, 308 aa, Homo sapiens
  misc_feature (1)...(308): Xaa = X or * as defined in Table 2
SSGTRHPDGDRGGQPAPICPRQGSCSHSPLEHAPCPNLGPGSWPRWHLDLLSLLGDPKVGGPIACPPGSPPHAWTGPLWPVRALASPAAAPPILIPHPIPCQHPKAPGGHPLCSKLLTCLPATPAVPSQPAIITPCSLCQASWEPGLLQKLAPAPPKLDHVGPRSQPGGPDVGVPVCTPKSRPSTCDTTPTPLPGLNEERATGHMRKRLPWELLMPVTSPLWLWAAGPCTXDACLEMSLHSWPPSQPPPREKPLRSAQGVCAALXRAGTTLPRLGPLRHKAWGPTDLSPQLPPQKASKINTRGMESVK

SEQ ID NO: 14687 - protein, 62 aa, Homo sapiens
  misc_feature (1)...(62): Xaa = X or * as defined in Table 2
XGSSEQQDTCSNPGPCSSPTGNPEWGLRDTALLEDLGKASGLLLERMVDMPANNKCLIFRKN

SEQ ID NO: 14688 - protein, 247 aa, Homo sapiens
  misc_feature (1)...(247): Xaa = X or * as defined in Table 2
PIEITSQCGGIPRFAPITVGVRVSSLPHHSRGEGLQPPPSQSGXGSPASHHHSRGEGLQPPPSQSGXGSQPPPSQSGXGSPASGPGFCWGQRPPLPSCSYSPGALQSSRTPAQTQGPAHHLRGSGPVHGGPPAPSPSCCLLPSLRVLPPGLPAPPPATSTVCPPLPVCTPPWVICQPPYPLAHQAGLGXLPLGDREGVPFHSPNPSLQVCPRPLRKPRPWSSGLGPHAHNPMPSMGRSPPRATWTLT

SEQ ID NO: 14689 - protein, 252 aa, Homo sapiens
  misc_feature (1)...(252): Xaa = X or * as defined in Table 2
GRGAEQGSHLARAAAVPGSGPAWRPRPRGGLGLRPARSALRAGLPPGRVAAVGRGPALPGQGHLQSSRTPAPNPGPCSSPTGEGVPFHSPNPSHGKSVPGSSGKYPDLGPVGLCPHAHSPMPSMGRSPPRGKRGLXPDAQMQEPSKWGLSGHSPPGGPGKGQWPAPGEDGGHASQQQMPDLPEKLSPSFTPAHLHSLPEAPVRHEPCLPRHGPCGRQPHPVCARHRRARRAQPAQNKACPAAGKKKKKPVPN

SEQ ID NO: 14690 - protein, 79 aa, Homo sapiens
  misc_feature (1)...(79): Xaa = X or * as defined in Table 2
PRSLSPHRPAPPPSVSVGFRPRGKRGTQGDKGKCLGYRGPQQLXPHGTPGPTQGRRARGCYLQPGAWGPLLSPPWECDV

SEQ ID NO: 14691 - protein, 92 aa, Homo sapiens
  misc_feature (1)...(92): Xaa = X or * as defined in Table 2
GKKIPMLYFAEIEQCILKFVKRSXKAKXILPKNNKAGGLKFPDFKTYYKAAASKHQVGGLWKELRSTLQAQQTWVPREELRSTSPSYQTQVQ

SEQ ID NO: 14692 - protein, 61 aa, Homo sapiens
  misc_feature (1)...(61): Xaa = X or * as defined in Table 2
VIYRVSIISIKIPTTFFTEIEKTYNLGWNDNRPXIPKAILSLXNKVGDIPLPDYEYHLNMN

SEQ ID NO: 14693 - protein, 81 aa, Homo sapiens
  misc_feature (1)...(81): Xaa = X or * as defined in Table 2
GKKIPMLYFAEIEKCILKFVKRSXKAKXILPKNNRAGGLKFPDFKTYYKAAASKHQVGGLWKELRSTLQAQQTWVPREELR

SEQ ID NO: 14694 - protein, 122 aa, Homo sapiens
  DOMAIN (34)..(52): kw TRANSCRIPTASE REVERSE II ORF2 domain identified by eMATRIX, accession number DM01354C, p-value=7.049e-15, raw score of 8.79
  misc_feature (1)...(122): Xaa = X or * as defined in Table 2
DPTVCCLQEHLTFKDTHRLKVKSWKKILHANRNQKKAGIAKLISDKIDFKSKTVKRDIIXMIRASIHPRRLINSYIWAPNIGNTXIHKILKDLKGGINCNTIIVGDFNTHRXSRQKINKHWA

SEQ ID NO: 14695 - protein, 98 aa, Homo sapiens
  misc_feature (1)...(98): Xaa = X or * as defined in Table 2
RRSINSVAQAGVQWRDLSSLQAPPPGFTPFSXLSLPSSRDYRCLPPCLANFLYFXXRLGFTVLARMVLISXPSDPPTSASESAGITGVSHCAWPISFS

SEQ ID NO: 14696 - protein, 148 aa, Homo sapiens
  DOMAIN (75)..(105): kw TRANSCRIPTASE REVERSE II ORF2 domain identified by eMATRIX, accession number DM01354M, p-value=8.100e-12, raw score of 12.50
  misc_feature (1)...(148): Xaa = X or * as defined in Table 2
NHSELQLKLRVAXKMKCTADLSLLEKDTXIKLEENRXQERIMLRAEVNEIENKIENINKTGGSSSEKYYKIDNPLTRSIRRKXTXITSFRNEKGSVTTNPTEIKRTVKEYYYEKLYANKFNNLDEMKKFLKHNLPKLTQKINRKSECS

SEQ ID NO: 14697 - protein, 148 aa, Homo sapiens
  misc_feature (1)...(148): Xaa = X or * as defined in Table 2
LPQVMAEFRNNPGEVEGRKAKSMKGQTTGKNQDNPVIDEIDFLEAFKNIQPSSLFEASLGLMGIKPVDWEEIGGLEDVKPEVKTAHWSLRQKSGHCPVGARLPTGLLATLGSGSGSGRATEAVSGPAGXKRASIGGSSQRPRRFPTVP

SEQ ID NO: 14698 - protein, 345 aa, Homo sapiens
  DOMAIN (196)..(243): AAA-protein family proteins domain identified by eMATRIX, accession number BL00674D, p-value=7.065e-19, raw score of 23.41
  DOMAIN (88)..(296): ATPases associated with various cellular act domain identified by PFam, accession name AAA, E-value=8.9e-64, PFam score of 225.3
  misc_feature (1)...(345): Xaa = X or * as defined in Table 2
CREAAMHALLHSEKDNPVIDEIDFLEAFKNIQPSSFRSVIGLMDIKPVDWEEIGGLEDVKLKLKQSIESPLTFPWEFVRMGLTQPKGVLLYGPPGCAKTTLVRALATSCHCSFVSVSGADLFSPVVGDSEKVLSQIFRQARASTPAILFLDEIDSILGASRQPSKTGCDVQERVLSVLLNELYGVGLKTIERRGSKSSQQEFQEVFNRSVMIIAATNRPDVLDTALLRPGRLDKIIYIPPPDHKARLSIYKRLYKKPCPIGPDVSLENLAAETCFFSGADLRNLCTEAALLALQENWTRPQLTVKQEHVFXNHLRLXNRSVKVARTWLYMKTYLRKKDFLTVEGI

SEQ ID NO: 14699 - protein, 682 aa, Homo sapiens
  DOMAIN (136)..(151): RIBOSOMAL PROTEIN P2 SIGNATURE domain identified by eMATRIX, accession number PR00456E, p-value=6.810e-09, raw score of 3.06
MAANRKDFIHRRCGPELSQSEAVPQGLCRAERSSALAMLSGSVPRRTQLRPCKGTQRRCRRGGEADSGGEAVGGGAAERRSAAARRRGGRRRGGGEAVGGGAAERRSAAARRRRGGRRRRGGGEAGGGGAAEARRAAAARRAAAARRAAAARRAAAARRAAAARRIAESGGEAHSRGEAHSGGEAHSGGAGAERRRPRLHSPALKTHPGQSSEGHVEYKLNHVEFEDQDDEARVQYEGFRPGMYVRVEIENVPCEFVQNFDPLYPIILGGLGNSEGNVGHVQMRLKKHLWYKKILKSQDPIIFSVGWRRFQTILLYYIEDHNGRQRLLKYTPQHIHCGAAFWDIVFMRTWYPVSIPAFYNPVTSLLKPVGEKDTWSGMWTTGQLRLAHGVRLKTNKDSLYKWWDTAASQSLKGQAQHQQGPQNGGALLWLEPSGAGTSTATTSLPGEADISFSTIVLKALQMSNCKSYKKSVSKLLNRRTQRAPNVHLQILQKECLNLLNQKKCSTRPQSEQNVRLQILQKECFQTAQPKGRSVCFFPAKAEAGPTETVPAAYSDGVYEVIQADEADISSASRMEVENLGLGPRTVDHAGLPWTVTDSCSHQDPQNRPLKKMLPSGQVALADIILINKTDLVPEEDVKKLRTTIRSRSSAGRGSRRMPFSVSPLQPYTKCAPCISNSIVESL

SEQ ID NO: 14700 - protein, 1446 aa, Homo sapiens
  DOMAIN (346)..(367): GTP1/OBG GTP-BINDING PROTEIN FAMILY SIGNATURE domain identified by eMATRIX, accession number PR00326A, p-value=1.386e- 09, raw score of 8.75
MSAFESVPDDEEVDVDAVPENKLTFDNLAEGFRLFKTACDFLYHMDLSMNEDIEKEVKEEIDPDEEESPKKKHLDKKRKLKEMFDAEYDEGESTYFDDLKGEMQKQAQCLGGRSSVSMQAHRRPVVHGGDSCSDPAAMLTTVKAEFTTGGVLQRGGLQQSWQAPIFMDVGEWEQRNWRLNCRKLLWGFAAERSREMKPLLVEEVESKGFEIRERTEGRAVGIKSRKSGWCLGCPRRTENQPACLQSDLNSDPRALVIRTSTKVKETLSLEEGTVKNTDYSELGHMGREQWSSEQPLEQTLQDYTKRYTQQHYTEIDQDGGTQDLKTKKHHIPVVDRTPLEPPPIVVVVMGPPKVGKSTLIQCLIRNFTRQKLTEIRGPVTIVSGKKRRLTIIECGCDINMMIDLAKVADLVLMLIDASFGFEMETFEFLNICQVHGFPKIMGVLTHLDSFKHNKQLKKTKKRLKHRFWTEVYPGAKLFYLSGMVHGEYQNQEIHNLGRFITVMKFRPLTWQTSHPYILADRMEDLTNPEDIRTNIKCDRKVSLYGYLRGAHLKNKSQIHMPGVGDFAVSDISFLPDPCALPEQQKKRCLNEKEKLVYAPLSGVGGVLYDKDAVYVDLGGSHVFQVSDEVGPTHELVQSLISTHSTIDAKMASSRVTLFSDSKPLGSEDIDNQGLMMPKEEKQMDLNTGRMRRKAIFGDEDESGDSDDEEDDEMSEDDGLENGSSDEEAEEEENAEMTDQYMAVKGIKRRKLELEEDSEMDLPAFADSDDDLERSSAEEGEAEEADESSEEEDCTAGEKGISGSKAAGEGSKAGLSPANCQSDRVNLEKSLLMKKAALPTFDSGHCTAEEVFASEDESEESSSLSAEEEDSENEEAIRKKLSKPSQVSSGQKLGPQNFIDETSDIENLLKEEEDYKEENNDSKETSGALKWKEDLSRKAAEAFLRQQQAAPNLRKLIYGTVTEDNEEEDDDTLEELGGLFRVNQPDRECKHKADSLDCSRFLVEAPHDWDLEEVMNSIRDCFVTGKWEDDKDAAKVLAEDEELYGDFEDLETGDVHKGKSGPNTQNEDIEKEVKEEIDPDEEESAKKKHLDKKRKLKEMFDAEYDEGESTYFDDLKGEMQKQAQLSRAEFEHQDDEARVQYEGCRPGMYVRIEIENVPCEFVQNFDPHYPIILGGLGNSEGNVGYVQMRLKKHRWYKKILKSRDPIIFSGMFNSALEVAKFEGAVIRTVSGIRGQIKKALRAPEGAFRASFEDKLLMSDIVFMRTWYPVSIPAFYNPVTSLLKPVGEKDTWSGMRTTGQLRLAHGVRLKANKDSLYKPILRQKKHFNSLHIPKALQKALPFKNKPKTQAKAGKVPKDRRRPAVIREPHERKILALLDALSTVHSQKMKKAKEQRHLHNKEHFRAKQKEEEEKLKRQKDLRKKLFRIQGQKERRNQKSSLKGAEGQLQ

SEQ ID NO: 14701 - protein, 84 aa, Homo sapiens
  misc_feature (1)...(84): Xaa = X or * as defined in Table 2
PRSLSPHRPAPPPSVSLGFRTRGKRGNQGRQGEVSWGTGGPQQLWPHGTPGPTQGRRARGCYLQPGASGPFLRPPWECDVXERG

SEQ ID NO: 14702 - protein, 235 aa, Homo sapiens
  misc_feature (1)...(235): Xaa = X or * as defined in Table 2
KEELYGDFENLQTGDVHXGKFGPDSLNEDVQIQEEIDPDEEESAKKKHLDKKRKLKEMFDAEYDEGESTYFDDLKGEMQKRSTGKQHTRFPPRAPRHVQLNHAEFEDQDDEARVQYEGFRPGMYVCVEIENVPCEFVXNFDPRYPIILGGLGNSEGNVEHVQMRLKKHRWYKKILKSQDPFISSVGGRRFQTIPLYYIEDHNGRQRLLKYTPQHMHCGAAFWGKIXLQXLAYCRD

SEQ ID NO: 14703 - protein, 91 aa, Homo sapiens
  misc_feature (1)...(91): Xaa = X or * as defined in Table 2
TYESEYFLLLLFLFFRRQSLALLPRLECSVKIIAHSXNVKLLDSSDLPDSASRVAGIAGACHQAQLIFIFIFVEMGSCLSSFLSVGLNQLF

SEQ ID NO: 14704 - protein, 155 aa, Homo sapiens
  misc_feature (1)...(155): Xaa = X or * as defined in Table 2
LVFFSWCLFVCLFVLKTESHSIAQAGVQXRDLSSLQPPPPGFNRFSCLSLLSSWDYRRAPTMPNXFYCWPAGLKLLTSGDPPASASPSVGITGVSHCAQPRIVSFTSNIILKFKNSLSKGCLIEAYFDKTVKATVLEYLALRNPKPEEHIWGFLY

SEQ ID NO: 14705 - protein, 156 aa, Homo sapiens
  misc_feature (1)...(156): Xaa = X or * as defined in Table 2
QNRDVHPAASPNPSAAQGSXRAKTHSEGPLSVPGPSPAAPARSLXEQNPKPKHSLPXXLSSQLGSPLEDVGNDTLLSRHKPQSPPSRGRPRPEGTRLHFTEPQRLRSSRQPTITAHVVLPMPPLPTPPAAHACPPLPTHARGTSSKQAEPPPSACS

SEQ ID NO: 14706 - protein, 141 aa, Homo sapiens
  misc_feature (1)...(141): Xaa = X or * as defined in Table 2
TRPTEHLKLSSAVSPGFCRWPPSAPKAELSPAVPRSPAAGAATIAVVRSRWSPGEPRCPLQTTASVRCAPMHRRPVDGACSPPVVXACRAAARLGPREGPPWDPQSPQSRAEQKMLPVFGRASDAPFIDKKGFFCLISCCG

SEQ ID NO: 14707 - protein, 664 aa, Homo sapiens
  DOMAIN (451)..(461): 7 kw REVERSE TRANSCRIPTASE RNA POLYMERASE domain identified by eMATRIX, accession number DM00895G, p-value=6.696e-09, raw score of 3.62
  misc_feature (1)...(664): Xaa = X or * as defined in Table 2
LSILSHCKRGVGCWLFTVALGWDHEQPCAPSTHGRAQPEGPRVLPGRSRRPGTQTLAAPQPEPGECTSQARSGGPVSPHKAGSEAQESXEGSEDPQDXELQQERTAKNILGKRLPQXIILYCHSHLGEGPQTXNPGERRVXPPEFGLGCGXDSTLLLAEEGSGWRGPPWPAGASTPLEAQAPVXAGGCGPPAELPPQPGGAGHPGRPGGGSLGHQAGGXGQXXPHPSGPAXPSAXGPRSRRPSGGRSQPAVSGPGWAWHCPASGPPGTSSFEPQLWLWPLPGLPGQQRPPRLSAARGPQAHGPPRGPFSSPGDRHGPAGGPAVHPARHQRXPAVPAGVTQPGAVQLLLPPHRAGPLQGPGLGSLAWASCEGPPSLLLALPRASWLQTENWCQWLPPPSQVVSCLGNRQXRPDFAQGIPLRGAPLGPRLPWRGLARAPAPGPWGAPSQCQLPWGRHPSGHLSACPGLPGGSVSGPPSGGPAGSPPTGPSGAPGSAGXGPGMAQGGPQELXGQGPKAGEADSPPSPWPCLQGPPGLWAPLPRALDAPPPAWVYPPRPPASAGGSPCAAPRSPPAASPAGPASGFSAAPACSLITLKQDGGGPSISGPASFLQLAWPPGFHPARLHGPSAREARAGSPGPGAGFSAGRGGFPPWSLSSAGCPVSPAA

SEQ ID NO: 14708 - protein, 118 aa, Homo sapiens
  misc_feature (1)...(118): Xaa = X or * as defined in Table 2
RPAGCGSTRGTCEWARPSAAPCQTAAGGACSPWTPAPRSPAGRSWASSSWPGXCWAPPSGHGAQQPSPSSGQWWVMRWAPASWLPSGATPGPRFLALGTIGVPAGPRSPSPSFPTQRF

SEQ ID NO: 14709 - protein, 516 aa, Homo sapiens
  DOMAIN (456)..(483): Protamine P1 proteins domain identified by eMATRIX, accession number BL00048, p-value=5.368e-12, raw score of 6.39
  DOMAIN (5)..(205): Ank repeat domain identified by PFam, accession name ank, E- value=3.6e-30, PFam score of 113.7
  misc_feature (1)...(516): Xaa = X or * as defined in Table 2
DKDNSGPTVLHLTARFGHPKVVNWLLHHGGGDPTAATDMGALPIHYAAAKGDFPSLRLLVRHYPEGVNAQTKNGATPLYLACQEGHLEVTQYLVQECGADPHARAHDGMTPLHAAAQMGHSPVIVWLVSCTDVSLSEQDKDGATATHFAASRGHSKVLSWLLLHGGEISADLWGGTALYDAAENGELECCQILVVNGAELEVRDRDGYAAADLSDFNGHSHCTHCLRTVENLSMEHCVLSRDPSVELEAKQPDSGMSSPNTTVSVQPLNFDLSSPTSTLSNYDSCSSSHSSIKGQHPPRGLSKHXSCRHTELHGHAEPRAGPALGHDWEAHTPTTPTQLPPATPAPRHPTAPTPTXLPISQASCGTTGSXHLHADQEQTPPRGDRGPQEGAEPPATATTGYGGRTPAASPALSASSPARGTTTGSWAAAPARRWSHARAWRTARRRNSLGTTCLTAAPRTPRRPGSSSCRRRRRRRPCPRPRVRRRRSRLCPSRALALAAGSAAPPRPPAAPSLST

SEQ ID NO: 14710 - protein, 719 aa, Homo sapiens
  DOMAIN (611)..(666): Eukaryotic initiation factor 1A proteins domain identified by eMATRIX, accession number BL01262, p-value=1.000e-40, raw score of 22.38
  DOMAIN (591)..(691): Eukaryotic initiation factor 1A domain identified by PFam, accession name eIF-1a, E-value=3.2e-71, PFam score of 250.0
LTAASSCCYPREGWRYPREGWRYSREHNAILWPFGELMTEADILRIEQQSSPCSITAPPTSCAHWTRRPRAVRAASPRSPLAPRSASPSCRRTTWRPALASPAPPPPTARWPTGSPWTPWARLRHRIARRRYLSPSSWRAGRPSARNCAASRTTSTCARSASFTSSWSTGASGPSSDRAFRGPGAPRQTAPWRDGRPCWPELEATDAPRLPVSKGEAHSPNERLRQLLRQRQAVGKLLHHWRSLRRHVPPSPGLAHGVYWPQHFLSPLDGGAPPRYESLTLDLFMLGYFQLPEMGLSREDRKFRHLLCYEMFHRLDSHPWERIRLFHRVVLEEVEAGRRGWSDGFEDLRHRFFGNGLEAGPAPEEQAKKKEEKGKEQERTEEAAPVQKGDPPKGQREALAPVPQPPPPPARPPARRASPPRLPGSLVFQEEEEARLASMPAWRWDLLRKKLSAFSPPGSTQHLRSQLSQCKQRYQDLQEKLLLSEATVFAQANELEKYSSHAGEPLLKQDSKQVQVDLQDLGYETCGQSKNEAEQEETWPPAPTWSRALPRVAPRSSSRRGRRYPERSQRRREVAATAMPKNKGKGGKNRRRGKNENESEKRELVFKEDGQEYAQVIKMLGNGRLEAMCFDGVKRLCHIRGKLRKKVWINTSDIILVGLRDYQDNKADVILKYNADEARSLQAYGELPEHAKINETDTFGPGDDDEIQFDDIGDDDEDI

SEQ ID NO: 14711 - protein, 247 aa, Homo sapiens
  DOMAIN (136)..(191): Eukaryotic initiation factor 1A proteins domain identified by eMATRIX, accession number BL01262, p-value=1.000e-40, raw score of 22.38
  DOMAIN (116)..(216): Eukaryotic initiation factor 1A domain identified by PFam, accession name eIF-1a, E-value=3.2e-71, PFam score of 250.0
MSEGWEIEEDKEKGKVVVETVVAKEGLSEPLLKQDSKQVQVDLQDLGYETCGQSKNEAEQEETTSPAPTWSRALPRVAPRSSSRRGRRYPERSQRRREVAATAMPKNKGKGGKNRRRGKNENESEKRELVFKEDGQEYAQVIKMLGNGRLEAMCFDGVKRLCHIRGKLRKKVWINTSDIILVGLRDYQDNKADVILKYNADEARSLQAYGELPEHAKINETDTFGPGDDDEIQFDDIGDDDEDIDDI

SEQ ID NO: 14712 - protein, 158 aa, Homo sapiens
  misc_feature (1)...(158): Xaa = X or * as defined in Table 2
VSVSVGLRPPWELQVWVLCVPRGQAKTRLEPAGRAPEAPLPALSVLAGGSDSDSRFRQSLSSAAAPGADSLGARTELRVEPGPSRPRPRPRPRPSWTTASTADASRRAAGARGRGNESAGSGAEVRSEQKVKRESIGNRXKRKNKTHSKRKKTLQQKG

SEQ ID NO: 14713 - protein, 1882 aa, Homo sapiens
LLEKLRQRIHDKAVALERAIDEKFSALEEKEKELRQLRLAVRERDHDLERLRDVLSSNEATMQSMESLLRAKGLEVEQLSTTCQNLQWLKEEMETKFSRWQKEQESIIQQLQTSLHDRNKEVEDLSATLLCKLGPGQSEIAEELCQRLQRKERMLQDLLSDRNKQVLEHEMEIQGLLQSVSTREQESQAAAEKLVQALMERNSELQALRQYLGGRDSLMSQAPISNQQAEVTPTGRLGKQTDQGSMQIPSRDDSTSLTAKEDVSIPRSTLGDLDTVAGLEKELSNAKEELELMAKKERESQMELSALQSMMAVQEEELQVQAADMESLTRNIQIKEDLIKDLQMQLVDPEDIPAMERLTQEVLLLREKVASVESQGQEISGNRRQQLLLMLEGLVDERSRLNEALQAERQLYSSLVKFHAHPESSERDRTLQVELEGAQVLRSRLEEVLGRSLERLNRLETLAAIGGAAAGDDTEDTSTEFTDSIEEEAAHHSHQQLVKVALEKSLATVETQNPSFSPPSPMGGDSNRCLQEEMLHLRAEFHQHLEEKRKAEEELKELKAQIEEAGFSSVSHIRNTMLSLCLENAELKEQMGEAMSDGWEIEEDKEKGEVMVETVVTKEGLSESSLQAEFRKLQGKLKNAHNIINLLKEQLVLSSKEGNSKLTPELLVHLTSTIERINTELVGSPGKHQHQEEGNVTVRPFPRPQSLDLGATFTVDAHQLDNQSQPRDPGPQSAFSLPGSTQHLRSQLSQCKQRYQDLQEKLLLSEATVFAQANELEKYRVMLTGESLVKQDSKQIQVDLQDLGYETCGRSENEAEREETTSPECEEHNSLKEMVLMEGLCSEQGRRGSTLASSSERKPLENQLGKQEEFRVYGKSENILVLRKDIKDLKAQLQNANKVIQNLKSRVRSLSVTSDYSSSLERPRKLRAVGTLEGSSPHSVPDEDEGWLSDGTGAFYSPGLQAKKDLESLIQRVSQLEAQLPKNGLEEKLAEELRSASWPGKYDSLIQDQARELSYLRQKIREGRGICYLITRHAKDTVKSFEDLLRSNDIDYYLGQSFREQLAQGSQLTERLTSKLSTKDHKSEKDQAGLEPLALRLSRELQEKEKVIEVLQAKLDARSLTPSSSHALSDSHRSPSSTSFLSDELEACSDMDIVSEYTHYEEKKASPSHSDSIHHSSHSAVLSSKPSSTSASQGAKAESNSNPISLPTPQNTPKEANQAHSGFHFHSIPKLASLPQAPLPSAPSSFLPFSPTGPLLLGCCETPVVSLAEAQQELQMLQKQLGESASTVPPASTATLLSNDLEADSSYYLNSAQPHSPPRGTIELGRILEPGYLGSSGKWDVMRPQKGSVSGDLSSGSSVYQLNSKPTGADLLEEHLGEIRNLRQRLEESICINDRLREQLEHRLTSTARGRGSTSNFYSQGLESIPQLCNENRVLREDNRRLQAQLSHVSREHSQETESLREALLSSRSHLQELEKELEHQKVERQQLLEDLREKQQEVLHFREERLSLQENDSSGPCLSLVRLQHKLVLLQQQCEEKQQLFESLQSELQIYEALYGNSKKGLKAYSLDACHQIPLSSDLSHLVAEVRALRGQLEQSIQGNNCLRLQLQQQLESGAGKASLSPSSINQNFPASTDPGNKQLLLQDSAVSPPVRDVGMNSPALVFPSSASSTPGSETPIINRANGLGLDTSPVMKTPPKLEGDATDGSFANKHGRHVIGHIDDYSALRQQIAEGKLLVKKIVSLVRSACSFPGLEAQGTEVLGSKGIHELRSSTSALHHALEESASLLTMFWRAALPSTHIPVLPGKVGESTERELLELRTKVSKQERLLQSTTEHLKNANQQKESMEQFIVSQLTRTHDVLKKARTNLEVKSLRALPCTPAL

SEQ ID NO: 14714 - protein, 377 aa, Homo sapiens
MKVTFANKPEGGGRLAKQRPPGRGARPRPKHEGGQSVLGTRRPALLQVSCTDVSLSEQDKDGATATHFAASRGHSKVLSWLLLHGGEISADLWGGTALYDAAENGELGCCQILVVNGAELEVRDRDGYAAADLSDFNGHSHCTHCLRTVENLHRGMVLALGAAEHSKAQRPEAAGGPEGELPPEKESLEENEWPSRGQGLVPSAPTAVAQSMEHCVLSRDPSVELEAKQPDSGMSSPNTTVSVQPLNFDLSSPTSTLSNYDSCSSSHSSIKGQHPPRAPNPQILQYKKRFSELEQLLERSGELEQQQLRDAEHSQDLESALIWLEEEQQGGPGLAAWPPGRAPTDPLCPIQECQPGPGECHALRTAGPGRFGQPGSE

SEQ ID NO: 14715 - protein, 54 aa, Homo sapiens
  misc_feature (1)...(54): Xaa = X or * as defined in Table 2
LPGAQGMPRPGVQXPSGLHIPQGGSTRTSGLKAMRSPPKNHQVPDSRAGPWAYC

SEQ ID NO: 14716 - protein, 498 aa, Homo sapiens
  misc_feature (1)...(498): Xaa = X or * as defined in Table 2
WNWTVHGDGSAGQGPWLHLFCHKRQHGGISWPLVQREGRDEHFRNQREIAPPAGREQTAVQKPQREMFCNSTGRLPGQPTEEIQVXRVXRPHKIYAEEERQFKEEKLAEQLKQAEELRQYKVLVHSQERELTQLREKLREGRDASRSLNQHLQALLTPDKPDKSQGQDLQEQLAEGCRLAQQLFQKLSPENDEDEDEDVQVEEAEKVLESSAPREVQKAEESKVPEDSLEECAITCSNSHSPCDSNQPHKNINITFEEDKVNSTLVVDRESSHDECQDAVNILPVPGPTSSATNVSMVVSAGPLSSEKAEMNILEINEKLHPQLAEKKQQFRNLKEKCFVTQLACFLANQQNKYKYEECKDLIKSMLRNERQFKEEKLAEQLKQAEELRMGSGKYLNEHFVFTENDEDEDEDVQVEEAEKVLESSAPREVQKAEESKVPEDSLEECAITCSNSHGPCDSNQPHKNINITFEEDKVNSALVVDRESSHDECQDAVNILP

SEQ ID NO: 14717 - protein, 160 aa, Homo sapiens
  misc_feature (1)...(160): Xaa = X or * as defined in Table 2
EAEALENQSQPCDTGPQSAFSPPGSTQHPRSQLSQCKQRYQDLQEKLLLSEATVFAQANELEKXRVILSEPLLKQDSKQVQVDLQDLGHETCGQSKNEAEQEETWPPAPYLVPRAPSCRPSEQSRRGRRYPERSQRRPRGRPPPPCPRIKVKDGKNKTQG

SEQ ID NO: 14718 - protein, 72 aa, Homo sapiens
  misc_feature (1)...(72): Xaa = X or * as defined in Table 2
TVKLLXHVGNISLFPSPSPXMLNTQWGKKSFNEWWWENWISTCRRIKLDPYLLPYIKTNXKSIKDLNCKTTK

SEQ ID NO: 14719 - protein, 72 aa, Homo sapiens; identical to SEQ ID NO: 14718
  misc_feature (1)...(72): Xaa = X or * as defined in Table 2

SEQ ID NO: 14720 - protein, 213 aa, Homo sapiens
GKGLFDDEDEESDLFMEAPQDRQAGASVKEESSSSKPGKKIPAGAVSVFLGDTDVFGAASVPSLKEPQKPEQPTPRKSPYGPPPTGLFFFSAPHSKPSKTRKVQSTADIFGDEEGDLFKEKAVASPEATVSQTDENKARAEKKVTLSYSKNLKPSSETKTQKGLFSDEEDSEDLFSSQSASNLKGASLLPGKLPTSVSWFDDEDEEDNLLGVQ

SEQ ID NO: 14721 - protein, 1032 aa, Homo sapiens
  DOMAIN (841)..(859): HIV REV INTERACTING PROTEIN SIGNATURE domain identified by eMATRIX, accession number PR00405B, p-value=8.744e-14, raw score of 11.83
  DOMAIN (811)..(931): Putative GTP-ase activating protein for Arf domain identified by PFam, accession name ArfGap, E-value=7.1e-48, PFam score of 172.5
MVTHQQPAARKPNMTSKKPKPMGPKAHGIFSGTRKNNLEIYMDQTRTGIAKTKLSKNNKSGGMTLPDFKLYYKAIVAKIACGGSMYNSDTDEDEETEPSSSGQQIIENSITMNKMKLLKAKMKNMNLSKKHITQVSDEEEDDDGCDLFADSEKEEKDIEDIEENTRPKRSRPTSFADELAARIKGDAVGRVDEEPTTVSYEDDRRGKNQDAYTEGGLSTIKTVNCSSSLPSGEAKLRKTLKEKKERRTPSDDEEDNLFAPPKLTDEDFSPFGSGGGLFSGGKGLFDDEDEEDIEESSNPLWSGYSLRWAREPPQQPETHTVVSTNEKPEQWLKGENWGSVSTPLQKRSRPTSFADELAARIKGDAMGRVDEEPTNEEDNLFAPPKLTDEDFSPFGSGGGLFSGGKGLFDDEDEESDLFTEAPQDRQAGASVKEGKLGLGSCVSVCRVPKLSFSLGDGTLRRHGCAASVPSLKEPQKPEQPTPRKSPYGPPPTGLFDDDDGDDDNDFFSTPHSKPSKTGTEKPFRKIGMDCDLGDTSSYHTKVSTVHITKNRNGGGSLNNYSSSIPSTPSTSQEDPQFSVPPTANTPTPVCKRSMRWSNLFTSEKGSDPDKERKAPENHADTIGSGRAIPIKQGMLLKRSGKWLKTWKKKYVTLCSNGVLTYYSSLGDYMKNIHKKEIDLQTSTIKVPGKWPSLATSACAPISSSKSNDLSKDMDTGLGDSICFSPSISSTTGPKLNPPPSPHANKKKHLKKKSTNNFMIVSATGQTWHFEATTYEERDAWVQAIQSQILASLQSCESSKSKSQLTSQSEAMALQSIQNMRGNAHCVDCETQNPKWASLNLGVLMCIECSGIHRSLGTRLSRVRSLELDDWPVELRKVMSSIGNDLANSIWEGSSQGQTKPSEKSTREEKERWILSKYEEKLFLAPLPCTDLSLGQQLLRATADEDLQTAILLLAHGSREEVNETCGEGDGCTALHLACRKGNVVLAQLLIWYGVDVMARDAHGNTALTYARQASSQECINVLLQYGCPDECV

SEQ ID NO: 14722 - protein, 79 aa, Homo sapiens
SDLFTEASQDRQAGASVKEGDTDVFGAASVPSLKEPQKPEQPTPRKSPYGPPPTGLFDDDDGDDDDDFFSAPHSKPSKT

SEQ ID NO: 14723 - protein, 116 aa, Homo sapiens
  misc_feature (1)...(116): Xaa = X or * as defined in Table 2
PASSIQQGGRRACLEVTWSCSIWNPTATGGLDRGSVRHSREGGGEAPVRVQGPGEMIPAVPKSSWTLHKMQLPGHVCSTLGRRGDEKGEAGPEAHAYDPSTLGGRGQRITXGQEFK

SEQ ID NO: 14724 - protein, 458 aa, Homo sapiens
  DOMAIN (150)..(170): Elongation factor 1 beta/beta'/delta chain proteins domain identified by eMATRIX, accession number BL00824B, p-value=8.176e- 09, raw score of 9.21
DDIFATEAIKPSQKTREKEKTLESNLFDDNIDIFADLTVKPKEKSKKKVEAKSIFDDDMDDIFSTGIQAKTTKPKSRSAQAAPEPRFEHKVSNIFDDPLNAFGGQLRSPSRCCQADCCPPDSGLWVWGALVGLGGARAAQHITQVSDEEEDDDGCDLFADSEKEEKDIEDIEENTRPKRSRPTSFADELAARIKGDAVGRVDEEPTTVSYEDDRRGKNQDAYTEGGLSTIKTVNCSSSLPSGEAKLRKTLKEKKERRTPSDDEEDNLFAPPKLTDEDFSPFGSGGGLFSGGKGLFDDEDEESDLFTEAPQDRQAGASVKEGKLGLGSCVSVCRVPKLSFSLGDGTLRRHGCAASVPSLKEPQKPEQPTPRKSPYGPPPTGLFDDDDGDDDNDFFSTPHSKPSKTGKVQSTADIFGDEEGDLFKEKAVASPEATVSQTDENKARAEKKVTLSYSQNVKP

SEQ ID NO: 14725 - protein, 139 aa, Homo sapiens
  DOMAIN (33)..(81): Hydroxymethylglutaryl-coenzyme A synthase proteins domain identified by eMATRIX, accession number BL01226I, p-value=4.690e- 09, raw score of 25.06
  misc_feature (1)...(139): Xaa = X or * as defined in Table 2
MDSSRSVGNGFTYQDKLSSSKLTSVLEAVAGEYALVINGHSLARHRYPXLGQYLSSEHFCPGLLYLVLISPDFREDWSQRGLGGAETPRCLLERLALSGFSVLQAHALEADMELEFLETACACKAVICCRVTPLQKAQV

SEQ ID NO: 14726 - protein, 232 aa, Homo sapiens
  DOMAIN (214)..(224): Transposases IS30 family, proteins. domain identified by eMATRIX, accession number BL01043B, p-value=7.333e-09, raw score of 8.60
  misc_feature (1)...(232): Xaa = X or * as defined in Table 2
LVKSYLAQFAARAIISELVSISELAQPLERGTHFPLFLLCLQQLAKLQDREWLTELFQQSKVNMQKMLPGKRKLTCLFCFFNIISRDFRYLEWIYVGQTVXLSCSDNDKHYHRSHLXREIYNLTTFIXSRCXVFFICWVGSLLCYKDLKYLGDIICEALLSGQDHLVKXTIRXCRWLCLFESDQNKDRMLEILEGKGLSFLFPTPQLEKDLFEQIKLDPSPQTIYKWIKDNI

SEQ ID NO: 14727 - protein, 991 aa, Homo sapiens
  DOMAIN (827)..(837): Transposases IS30 family, proteins. domain identified by eMATRIX, accession number BL01043B, p-value=7.333e-09, raw score of 8.60
  DOMAIN (916)..(991): eIF4-gamma/eIF5/eIF2-epsilon domain identified by PFam, accession name IF5_eIF4_eIF2, E-value=2.9e-33, PFam score of 123.9
  misc_feature (1)...(991): Xaa = X or * as defined in Table 2
GRPRLLPPPSLPLFFVFRSPFPSLPYPRRPDPEEAAAVAAAEFLGEGISFLLSPPLPTPSINIILLKILRCQAAKVESAIAEGGASRFSASSGGGGSRGAPQHYPKTAGNSEFLGKTPGQNAQKWIPARSTRRDDNSAANNSANEKERHDAIFRKVRGILNKLTPEKFDKLCLELLNVGVESKLILKGVILLIVDKALEEPKYSSLYAQLCLRLAEDAPNFDGPAAEGQPGQKQSTTFRRLLIPKLQDEFENRTRNVDVYDKRENPLLPEEEEQRAIAKIKMLGNIKFIGELGKLDLIHESILHKCIQTLLEKKKRVQLQDMGEDLECLCQIMRTVGPRLDHERAKSLMDQYFARMCSLMLSKELPARIRFLLQDTVELREHHWVPRKAFLDNGPKTINQIRQDAVKDLGVFIPAPMAQGMRSDFLLEGPFMPPRMKMDRDPLGGLADMFGQMPGSGIGTGPGVIQDRFSPTMGRHRSNQLFNGHGGHIMPPTQSQFGEMGGKFMKSQGLSQLYHNQSQGLLSQLQGQSKDMPPRFSKKGQLNADEISLRPAQSFLMNKNQVPKLQPQITMIPPSAQPPRTQTPPLGQTPQLGLKTNPPLIQEKPGKTSKKPPPSKEELLKLTETVVTEYLNSGNANEAVNGVREMRAHKHFLREMLSKVIILSLDRSDEDKEKASSLISLLKQEGIATSDNFMQAFLNVLDQCPKLEVDIPLGEIPILAQFAARAIISELVSISQNLAQPLESGTHFPLSFLLCLQQLAKFQDREWVNQELFSTKPRSNMQKMLPEIDQNKDRMLEILEGKGLSFLFPLLKLEKELFEANKSWDPSPQTIYKWIKDNISPKLHVDKGFVEHLXMTSFLQLHFXWSXTPPADETDSSSAPFQRNSXEQEKQLLLSFKPVMQKFLHDHVDLQVSALYALQVHCYNSNFPKGMLLRFFVHFYDMEIIEEEAFLAWKEDITQEFPGKGKALFQVNQWLTWLETAEEEESEEEAD

SEQ ID NO: 14728 - protein, 299 aa, Homo sapiens
  misc_feature (1)...(299): Xaa = X or * as defined in Table 2
EARWQDVGRLQLTKTVXPWGRGWSRASDPRLHAYFSYTAATGKAEPRARTPAPCKARERLGSCLWDXSPPPPPGWRPLRYPTPRRAGPAQFGKKRSASARSTWPXVMQRLAPKKTRKEQSANDHPIGGPEGRLFTSQLQLKFRALSERISWLEVSRAVTPTSAAVTSTPSTSKPRQKRPTNSQSRSAAKPTPGRRCQPGGRCPTCTRSPXLRXARGRRHGEARRLPLREARRLPLREARRLPLRAPRSFRKVPSPGQGRSAPQAGVGAGTGRRRRSMDAWGRARSLAGSAGGVISLGGR

SEQ ID NO: 14729 - protein, 143 aa, Homo sapiens
  DOMAIN (62)..(105): kw TRANSCRIPTASE REVERSE II ORF2 domain identified by eMATRIX, accession number DM01354T, p-value=5.300e-16, raw score of 9.48
  misc_feature (1)...(143): Xaa = X or * as defined in Table 2
HIKRVKKNHMIISVGTEKAFDKIQHSFIIFFKFRKKXEWGHFFNLIKSFSXKVRANITLSGDAFSLILVIRQGCLLLPLLFDKVLKVLDSAVKQEKEIRDIXVGKEEIKLSLFEDDMIVYIGNNKXSYRKLPEFINEFSKVAG

SEQ ID NO: 14730 - protein, 167 aa, Homo sapiens
  misc_feature (1)...(167): Xaa = X or * as defined in Table 2
AASTGGGWVSEFESVAPGSPDTTAAPTCPQRTPRSLELPHFQSXTGPCLNPISPERVSEPGQNRGKPRPHPYPGPNQWPGPAGGCWSKPGSTPALSDDQANTQVDRNDLQVASEGEGAXPAELFPKKMKKRLGDLGPGFEGKNGLSTEDKNLIPQAWVPALCGYHVL

SEQ ID NO: 14731 - protein, 151 aa, Homo sapiens
  DOMAIN (59)..(114): kw TRANSCRIPTASE REVERSE II ORF2 domain identified by eMATRIX, accession number DM01354Q, p-value=7.802e-19, raw score of 9.23
  misc_feature (1)...(151): Xaa = X or * as defined in Table 2
VRKYSLCFYILXNLFQNIKAEGILPNSFNEARITLILKQTRHSKENKPYRPISMDRHAEILNKISANXIRXRMKRIIHHGQVRFSXGMWGWFNIRKQINVIHHTHSLKKKNHMIISINAEKEFDKIRKLPKLRNIYKQNIXLTSXVMVRNS

SEQ ID NO: 14732 - protein, 419 aa, Homo sapiens
  misc_feature (1)...(419): Xaa = X or * as defined in Table 2
VYKKVEASRNEKGWVCGTHAGAFPDEGEGPEEAAFLGAETAAGAPGARDHPPFNHGYAGLLEGPDLQVGSPHSPGRRQAXVCGXRAPQSDCPGGSGRGSMGEAGMPPRQGPGGLQPPQEGSVFAVMYSIGGQGAVRRIPVRPQPGREGVGQGSLQPMKPDGEAASIPTAGSRSGRCGPAGRGRRALVGRSLRPXPPCXPSPRXSPPPSSGASSPGHPRPALAHNGXSGWATRGSXXDTAPSXHLLVPKQLAGTCLLCRCPKSTXXAKLEEIVPGSFHSPRGSYSRGLGAQHQLPSPASVAHPRCQPAPSAASHGXRRPRPACLSLHGQLGMIWXSXAPSGVQAQGHTHPPGPDISAERAPAGSXLSQLQGPGXDSGGLGSGGCAVPPVAAGHPGSGLAWQLPPPRXSPAPGSGSPAGRP

SEQ ID NO: 14733 - protein, 226 aa, Homo sapiens
  DOMAIN (116)..(134): von Willebrand factor type D domain proteins domain identified by eMATRIX, accession number PF00094B, p-value=9.892e- 09, raw score of 10.43
  DOMAIN (94)..(139): von Willebrand factor type D domain identified by PFam, accession name vwd, E-value=4.8e-07, PFam score of 28.8
EAALTDLRVQARSQPGTMSIGTENRGSGLSAVAVQEVISDVVEVRLANRPGGLEVLLNQEVLSFTEQSWMDLKGMFLSVAAGDRVCIMLASWAVLFVSLLGPFLSVSVLLPEKFLTHTHGLLGTLNNDPTDDFTLHSGRVLPPGTSPQELFLFGANWTVHNASSLLTYDSWFLVHNFLYQPKHDPTFEPLFPSETTLNPSLAQEAAKLCGDDHFCNFDVAATGSLS

SEQ ID NO: 14734 - protein, 163 aa, Homo sapiens
  misc_feature (1)...(163): Xaa = X or * as defined in Table 2
ECGVFSFPFLFLRQCLVLSPQAGVRWPHLGSLQPQDSPGSSRPSHLTLLSSWDLTGTCPPCLANFRIFFVETGFTCFPRLVLNSXGSSDPPTPQSVGDCRAGSHHTLAVFSFCFEMGPCSITRAGVRXHDHSSLQPXNPGLKRSPCLSLPSSGDYWSMPPCLA

SEQ ID NO: 14735 - protein, 74 aa, Homo sapiens
RSTISTSSISPSQEVEDRWQNHNTQHAQSALAADWMVSIHTACGSSSPRPPTQLSVFSGNTLTDTPRNSTPPAI

SEQ ID NO: 14736 - protein, 331 aa, Homo sapiens
  DOMAIN (234)..(273): C-terminal cystine knot proteins domain identified by eMATRIX, accession number BL01185C, p-value=4.778e-09, raw score of 15.86
  DOMAIN (254)..(279): von Willebrand factor type D domain identified by PFam, accession name vwd, E-value=1.1e-06, PFam score of 27.5
  misc_feature (1)...(331): Xaa = X or * as defined in Table 2
PGILSLRNALLTGVDCKVVVPVPPGHTHPQLRLFHFHPKTCSGWGEWGDHGVVWAGPAPAYHLHRDVQALWTNDHALAWPXAMTSERTLWPGHELSARPGRSWRISCPTGLPQGGDDRTRGHWVTATCCSADGLRLCRYGDGVRGGLPTVAWPXLTGSCSLRYGSGQQCCYTADGTQLLTADSSGGSTPDRGHDWGAPPFRTPPRVPSMSHWLYDVLSFYYCCLWAAPDPGKDRAGLGCTPTXPSTLTLASAFGDPHFVTFDGTNFTFNGRGEYVGMGXNQGGRLEPSGSRSAPTTAGTETRGTGLTAVAVQEGNSDVVEVRLANRTGPER

SEQ ID NO: 14737 - protein, 140 aa, Homo sapiens
  DOMAIN (59)..(102): kw TRANSCRIPTASE REVERSE II ORF2 domain identified by eMATRIX, accession number DM01354T, p-value=4.500e-16, raw score of 9.48
  misc_feature (1)...(140): Xaa = X or * as defined in Table 2
RPKPKNSFXLGGEKANKIPHPLMIKTLTKLGIEKTYVNIIKVIPNRPMACIIINGTKVKAFPVRFERQRCSPSPLLFNIGLKVPARAIEKEKEMKGIXIGKKEIKLCLSGNDMTLYLKQPKNSPKTIRTDTFSKVAGYKN

SEQ ID NO: 14738 - protein, 138 aa, Homo sapiens
  misc_feature (1)...(138): Xaa = X or * as defined in Table 2
NWSGRRLRMWPSAALSPAVSSPALALTSPPKPLVKGRDGKPPAGRPPGREGPGAWRXGPSPPTTLGPAKAGSGQRGGRCQPXGPGWRPAASQPLSGCPWCPGITELLLESPSETAEQDRGPGSGEDSXTPDFYTPTRP

SEQ ID NO: 14739 - protein, 272 aa, Homo sapiens
  misc_feature (1)...(272): Xaa = X or * as defined in Table 2
HSVQKAKADKTGVDGGSECGPPLLSLLQSHPRPXPXPLPQKPPEREEVWPKDGKLLASRAGGLVCISLLXEPRVHSCTGPGLPVKAELGLLRAQGLPHPASPARLGNTGVGLATEXTGISEHKLGPLGNXGVMGDAVRXGLCSEGLCPPSRPWGPMGVCGGLAAKARPHXQGXVCAPGTHLEGSSVWSLPSPQLFPTPGPPAVCSALAPAPTPARTDGTIQNHLWPVTRKSALPVQEWGGDSWGTGQAQEEGPSVGYPGCPXLPGEGRIPPL

SEQ ID NO: 14740 - protein, 218 aa, Homo sapiens
  misc_feature (1)...(218): Xaa = X or * as defined in Table 2
CPMPLVPPDISLINEQTEKEAGDLVCPSAGPVPDSFPLGSEPSSHGVSELKTRAKRQRERHKKGGTEKDRKAERGTPPGPLLPFLFVHXSGXCQVAQGALDIISWLKIIVPKSVFPGCPLKSWAAAATPCSPCHPSSHCSPVGVPGRASKFCACPLECPXSPPSPLPSLQGPHLCPPPFHASPPDGNPGGQGVPLCPLRGSPGHLCAMSRCPLRWNWP

SEQ ID NO: 14741 - protein, 201 aa, Homo sapiens
  DOMAIN (91)..(106): LIM domain proteins domain identified by eMATRIX, accession number BL00478B, p-value=6.891e-09, raw score of 14.79
  misc_feature (1)...(201): Xaa = X or * as defined in Table 2
EMESRSVTXAGVQXQDLSSLQPLPLHPGFKQFSLPPVSPSKLGITRHTAYLNFFVFLVGDGDFAMLARLVSNSSSQCDPPSSASQSVGITGVSHCACLTCSLCCQTMCFLVASRYFXFWDGNLFCYNLQIGDVYFIFIIYLFMRPSYSITQARMQWCDLGSLPSPPPRFKXFSCLSLPSSWDYTQHAPPCLANFFVFLAEM

SEQ ID NO: 14742 - protein, 59 aa, Homo sapiens
  misc_feature (1)...(59): Xaa = X or * as defined in Table 2
PNLGXLNPPPPGLKNFSCLGLPSKWEXKGQCLPPGPVNFGFLTKLGVFPCGPGWLEIYN

SEQ ID NO: 14743 - protein, 108 aa, Homo sapiens
  DOMAIN (1)..(100): CUB domain identified by PFam, accession name CUB, E-value= 0.00027, PFam score of 6.5
  misc_feature (1)...(108): Xaa = X or * as defined in Table 2
LSGVMLSPGFPGYYLFSTXCIMDNKATHRYCVYISSSXIFLQKHIHDYLEVRRGSSETSTGIGRLNGPQIPCFLLSTTHETSLYFHSDYSQNKQGFHIEYQGERSNKK

SEQ ID NO: 14744 - protein, 184 aa, Homo sapiens
  misc_feature (1)...(184): Xaa = X or * as defined in Table 2
SDPRTETESHKMLTDXRSSYLSLTALPFPLPKSEAITRNRASRAASLVRLTPSKKDVGFLQKPRLRSCSPSSRCPPGSAARSTXAAGTACGCCGTSPRQRXAPGALGLRRPPQSXGRRSSPRPSLTHPSSSALPPPPPTSPRTRYRGXSRAAPLLSLRLPSGKLFQPTCRPRVSLRXRPSQRVE

SEQ ID NO: 14745 - protein, 126 aa, Homo sapiens
  DOMAIN (3)..(58): kw TRANSCRIPTASE REVERSE II ORF2 domain identified by eMATRIX, accession number DM01354Q, p-value=1.614e-18, raw score of 9.23
  misc_feature (1)...(126): Xaa = X or * as defined in Table 2
KLSPSKPILASTLMGPIYHSKVKFIPGMKGQFNIQKSIIMTYHINITKNKNDMVISSSSSSSSSSSSSSSSSSSSSSSPIEGNYFPITKEYEKSIANIILDSXKLKAFSLRSGKRQGYLLSLLLFN

SEQ ID NO: 14746 - protein, 103 aa, Homo sapiens
  misc_feature (1)...(103): Xaa = X or * as defined in Table 2
FQLDTGSRSAPMLXCSGVIMAHSIAKSLQTPGLMGSFNLSLPSRWDYRHIPPYLANFLIFFIEMGSCYITQGSHFPTLNGLSLSSLANKIQGNIGSDLVEDTG

SEQ ID NO: 14747 - protein, 137 aa, Homo sapiens
  misc_feature (1)...(137): Xaa = X or * as defined in Table 2
NKVFHNNKRSIHQENKTILNVHVPNNKDPKXLKQLTKLTEDTDSSIIIVKDFNNPLSTLDRISTQNISXDLENLKNTMNQLDQINIYRTLMPSNTKIEHMMGHKISFIKFQRIKIIQNTFSENGVTKSNRYLENPKL

SEQ ID NO: 14748 - protein, 138 aa, Homo sapiens
  misc_feature (1)...(138): Xaa = X or * as defined in Table 2
KGQDLYGEVXKVLLKVIKQVLNKWKDMSCSNNXHTNFISNXNCIKVFFXLDEICSFVXXNKCXRIAKEVLSSSQXCLGGHLTSPHIRRSYNTTFSQSIWCCYRTKQIDXWTRTQNPEKDLRIXGDLIYDLRCCSSSRA

SEQ ID NO: 14749 - protein, 109 aa, Homo sapiens
  DOMAIN (1)..(85): PH domain identified by PFam, accession name PH, E-value=3.4e -07, PFam score of 30.7
LIKEGQIQKLSAKNGTPQDRHLFLFNSMILYCVPKLRLMGQKFSVREKMDISGLQVQDIVKPNTAHTFIITGRKRSLELQTRSSRATIEKHKQNSETFKAFGGRLLARD

SEQ ID NO: 14750 - protein, 129 aa, Homo sapiens
  DOMAIN (11)..(110): PH domain identified by PFam, accession name PH, E-value=9.8e -09, PFam score of 36.3
EEDIVNPANDLIKEGQIQKRSAKNGTPQDRHLFLFNSMILYCGPKLRLMGQKFSVRENMDISRLQGQDIVKPNTVHTFIITGTKRSLELQTRTEEEKKDWIQIIPATIGKHNQNGETFKAFGGPLNQGW

SEQ ID NO: 14751 - protein, 601 aa, Homo sapiens
  DOMAIN (543)..(556): 0 kw ZK63212 YDR313C ENDOSOMAL III. domain identified by eMATRIX, accession number DM01970B, p-value=5.269e-10, raw score of 8.60
  DOMAIN (150)..(338): RhoGEF domain identified by PFam, accession name RhoGEF, E- value=2e-31, PFam score of 117.8
  misc_feature (1)...(601): Xaa = X or * as defined in Table 2
RYIDVLGRRYTAPGLGXLWRHPAQSAVPTAHCGDPVSLAAAGDGSPDIGPTGELSGSLKIPNRDSGIDSPSSSVAGENFPCEEGLEAGPSPTVLGAHAEMALDSQVPKVTPQEEADSDVGEEPDSENTPQKADKDAGLAQHSGPQKLLHIAQGFLAPEETYVKRLHLLDQVFCTRGXRMRGIPPERSSWGHNSLNIFLPFQPASHGQFLLPELKTRITEEWDTNPRLGDILQKLAPFLKMYGEYVKNFDRAVGLVSTWTQRSPLFKDVVHSIQKQEVCGNLTLQHHMLEPVQRVPRYELLLKDYLKRLPQDAPDRKDAERSLELISTAANHSNAAIRKVEKMHKLLEVYEQLGGEEDIVNPAHELIKEGQIQKLSAKNGTPQDRHLFLFNSMILYCVPKLRLMGQKFSVREKMDISGLQVQDIVKPNTAHTFIITGRKRSLELQTRTEEEKKEWIQIIQATIEKHKQNSETFKAFGGAFSQDEDPSLSPDMPITSTSPVEPVVTTEGSSGAAGLEPRKLSSKTRRDKEKQSCKSCGETFNSITKRRHHCKLCGAVSPGRGGQGQEATLSSALTEQLSPHQQHTSHAHQPCTEGLPDPGSWI

SEQ ID NO: 14752 - protein, 67 aa, Homo sapiens
  DOMAIN (35)..(63): !!!! PROTEIN ALU SUBFAMILY WARNING ENTRY NUCLEAR PHOSPHO domain identified by eMATRIX, accession number PD02454B, p-value= 9.213e-13, raw score of 11.61
  misc_feature (1)...(67): Xaa = X or * as defined in Table 2
KQKWEKKQLKKSPGPGAAAHTCNPSTLGGXGGRITRSGNRDYPGQHSETPSLTXNGKNLGRGMVGGR

SEQ ID NO: 14753 - protein, 108 aa, Homo sapiens
  misc_feature (1)...(108): Xaa = X or * as defined in Table 2
SHAGCLIRFWRKSMTPTHSLPLTPTFLGTCEASFLEPRASPVPPQCSMALRRYRLDMGQSFWGGLPSSHPPDPSRPGFVPGVGHVPGQEGPGGKPAPDSSXHXDPTGG

SEQ ID NO: 14754 - protein, 473 aa, Homo sapiens
  misc_feature (1)...(473): Xaa = X or * as defined in Table 2
NDNASFGEVYYHPYPPVGSQCHDESGAGFPPGPSCPGTWPTPALKPGREGSGGWLLGQASPVTTAPCPACIFXVPCCTGEGQGWLGAPGKDASHGAXKMXGVKGRLCVGAPEGAGPSQGIXSFFTEPXXAHPQNGLYEDEHKNSRWGHPHPPXQWNWDRTSXCNIPSRPXVPHPWVRCAGLEPAGPGPHRTRTPSQVGVILFLQKRIKQPACEPYALFTPLSPHSSPASARPGSPSDXMCRAPEDSCPEMALLPGMGPPGSGERCSRAPSPGAQVTGGVPGPFTWGSGESRCFRAPSPGASGEEAKCSRSPFTGGSGESRCSGAPSPGAQVRAGVPRPITWGSGESRCSRPPSPGAQVRTGVPGPFTWGSGESRCSGPLHLRPGSYPVFLAPERKGPPQRSQEKGHKRGGSQAAPKPSSRPQESPSPLTPSGGPGSGRNGAXGVSEGXSAPGSGGEEEDVFGCXGPPALGPEG

SEQ ID NO: 14755 - protein, 129 aa, Homo sapiens
  DOMAIN (31)..(115): Zinc carboxypeptidase domain identified by PFam, accession name Zn_carbOpept, E-value=0.0036, PFam score of 15.4
  misc_feature (1)...(129): Xaa = X or * as defined in Table 2
HLTFCHHHYDDRVRGLYKGQKECPGIPRVYRIRHIGEGRHLYVLQFKDHPGIHQPLEPQVKYVGNMHSNKAFGRXLMLQLSEFLCEEIRNKNQRIVQLIQDTRIHILPSMNPDCYQGGVAKGPNKPWLC

SEQ ID NO: 14756 - protein, 120 aa, Homo sapiens
  misc_feature (1)...(120): Xaa = X or * as defined in Table 2
KHNRASPPPSXKKSSSPVTTKGRYTKTPHTDVPQGXQPPYKQRGGTSSSSPFSFIFSYSIVLSSSRPPHPGPTSPRLHPSPRSHLSEVPPLTQVPPLQGPVPHPDPTSPWLYLSPSSYLY

SEQ ID NO: 14757 - protein, 59 aa, Homo sapiens
  misc_feature (1)...(59): Xaa = X or * as defined in Table 2
MLQVAVEELPRRPSRPGELLQTHAAKVLAVDVELLERDTIGIQLVVFXRCWSHSHTCYL

SEQ ID NO: 14758 - protein, 234 aa, Homo sapiens
  DOMAIN (204)..(211): RNase H domain identified by eMATRIX, accession number PF00075I, p-value=5.263e-10, raw score of 16.21
  misc_feature (1)...(234): Xaa = X or * as defined in Table 2
TDSKCPFLVHQAHAAMXKERHFLTANGSCIKFHQDINRLLSSVFLPXELVVRHCRGHQKRVDEIAKGNRLADQRAKSAVRRPQGPKTLEAPLIWEGYIREIKPQYSPDRDRMGHLSRYTFQPSGWLQSEDCKVRLPASSQWKILKILHXAFHLGKHKTSVHPKIVLRRKSTKNGQIGCXYSXNPLKNNPFNRXLLPHHNQRMGSYSGEDWQIDFTHMPKINGIQCLLEWVHTFI

SEQ ID NO: 14759 - protein, 235 aa, Homo sapiens
  DOMAIN (182)..(201): PRION PROTEIN SIGNATURE domain identified by eMATRIX, accession number PR00341H, p-value=9.894e-10, raw score of 1.28
  misc_feature (1)...(235): Xaa = X or * as defined in Table 2
FSRDEVSPSWPGWSQTPDLRDTPCLGLPKCXDYRCGPPHLAESKFYFPIIXKLYHSMLCLXADSKSXKPMSLFLLFLFLFFLTQNFALVAQAGVQWHGFGSLQPLPPGFKRFSCLSLLSSWDYRCLPPRLAXFFVFLVQMGFTMLVRLVSNSXAQCDPHALASQSVGTIGISHCSWPNVIIYIITTMXIFFSIPPSPLLIRHLFFLFFFFETESRSVAXAGVQWHNLGSLQPPRL

SEQ ID NO: 14760 - protein, 246 aa, Homo sapiens
  misc_feature (1)...(246): Xaa = X or * as defined in Table 2
VMGPAPAGEQLRGATGEPEVMEPALEGTGKEGKKASSRKRTLAEPPAKGLLQPVKLSRAELYKEPTNEELNRLRETEILFHSSLLRLQVEELLKEVRLSEKKKDRIDAFLREVNQRVVRVPSVPETELTDQAWLPAGVRVPLPKCPMPXRACFRFLAPKPRITVCEASYLSGQPSIRPDINVDVALTMPREILQDKDGLNQRYFRKRALYLAHLAHHLAQDPLFGSVCFSYTNGCHLKPSLLLRPQ

SEQ ID NO: 14761 - protein, 168 aa, Homo sapiens
  DOMAIN (130)..(161): kw TRANSCRIPTASE REVERSE II ORF2 domain identified by eMATRIX, accession number DM01354G, p-value=9.673e-29, raw score of 11.57
  DOMAIN (3)..(168): AP endonuclease family 1 domain identified by PFam, accession name AP_endonucleas1, E-value=5.9e-09, PFam score of 20.1
  misc_feature (1)...(168): Xaa = X or * as defined in Table 2
LCWQPIRWWSPTLRANGHQKXSGVAILISDKTNFKATAVERDKEGHYIMLKGLVQQENITILNIYAPNTGTLTFIKRLLIDLRNEIDSNTIIVGDFSTPLTALDRPPRQKVNKETMDLNYTLEQMDLIDIYRTFHPTTAEYTFYSTAHGTFSKIDHRIGHKISLNTFK

SEQ ID NO: 14762 - protein, 64 aa, Homo sapiens
  misc_feature (1)...(64): Xaa = X or * as defined in Table 2
XLSQGEVVPQIPVKSGGPHGAGVLGLHLEGPFISREKRGAHPEAHLRSFEADAFQDLLATQGQX

SEQ ID NO: 14763 - protein, 589 aa, Homo sapiens
  misc_feature (1)...(589): Xaa = X or * as defined in Table 2
FFFVTFVMYFTTIFKKQTKTNLKSASPTPQNHPGSSSLAQPLSHPDPGPLSHNPGLALWDQPSLPAPPRPSSQGGGALCGEWGQPGPKAGPGLTSSGDWGVPSEVGDDQHASSGFXPXGWGTFKHXQPASLGTGRCSTSNTSAENLTCLSLPGSPGKTAPLPGPAQAGAGQPLPKGCAAVKAEVGIPAPPPPGGQDPHPSPAFLGSPGACGLRSTPCALPQALPQARPCPGRWFFPWLFPFQTGGAPDHPISLDPGDISFNWALQQEGKRTSARARGAYLLCPRTAPGKQGGREPPTPELKWRESQDNHPXRGAAPIPDVXPHCGCPQSQEGSRSPPASKLFQGESRPVFATWVCSRAKGTQKMAGXHXWGEQGTLVPRHTALQHQAGSPQPASTGPGDVXRDRVIEKRKQNAGHPWHSGLGSPGSKNRGPGPSLPPGGQSGAPGNCALAQEPGCGFTRCTPQTQEQKANPXLSTLPVTGPLPAGSSPPAHGGFTPWAPATXLPAPPSHXXHFPGVCRSPVPPSCRQALSPTGAQGPGXTTAQPSHPRPXMPSPGGQPGWCHMXAQAKPGAKASPAGCTFSQPPPPGRR

SEQ ID NO: 14764 - protein, 195 aa, Homo sapiens
  misc_feature (1)...(195): Xaa = X or * as defined in Table 2
QHLKLLNIKNHTGEKSXKCKECDKAFKWLSHFIIGKIVHTEENFYKCEQCGKTFNECSHLIAQESIYTXKKMYKYKDHEKAINIYSHLNHWRVHTXXKEYKCNYCQKIFQININLXSEEGIYFEDEHYKCEEGCSTFICITDFIVHILYXKKTLKCCSNFVQHQGIYIEEKLCKFNKFXKTLFQKVQLRRHQSSY

SEQ ID NO: 14765 - protein, 91 aa, Homo sapiens
  misc_feature (1)...(91): Xaa = X or * as defined in Table 2
PKKSTEKLLEVISNNSKFTRQKANVQKSITFLQYNSNEQVKFKMXNTLPYKMKYLGISVTKHMQDPYEEKYKTLMKDNKEEQNKXRDIPCL

SEQ ID NO: 14766 - protein, 111 aa, Homo sapiens
  misc_feature (1)...(111): Xaa = X or * as defined in Table 2
LADWAHRAPASPQRNGADYAVYINTAQEFDGSDSGARPDEAVSWGKIRVDAQPVKVKRWLGGAXGLWDDECGSHGLPRFPPTQVYAAASLVFPLLEAETFAQKMDAFTHEK

SEQ ID NO: 14767 - protein, 188 aa, Homo sapiens
  DOMAIN (1)..(181): Deoxyhypusine synthase domain identified by PFam, accession name DS, E-value=9.5e-31, PFam score of 115.6
LSGKEVRENGIHRIGNLLVPNENYCKFEDWLMPILDQMVMEQNKRGGFGLKKWTPSKMIARLGKEINNPESVYYWAQKNHIPVFSPALTDGSLGDMIFFHSYKNPGLVLDIVEAERGADYAVYINTAQEFDGSDSGARPDEAVPPWGKIRVDAQPVKVYANASLVFPLLVAETFAQKMDAFMHEKNED

SEQ ID NO: 14768 - protein, 286 aa, Homo sapiens
  DOMAIN (49)..(133): Sterile alpha motif (SAM)/Pointed domain identified by PFam, accession name SAM_PNT, E-value=2.2e-26, PFam score of 101.1
  misc_feature (1)...(286): Xaa = X or * as defined in Table 2
RNERHAYDKGTWKTRRAIMTVQXSGETNVDRAYNLLYQTLDWTDSYVTCXENKEIAAGQRNESHSNDWTKYQVWEWLQHLLDTNQLDANCIPFQEFDINGEHLCSMSLQEFTRAAGTAGQLLYSNLQHLKWNGGHTGISKSCKETRHLFPFFYLGPGHTLATCRAVSKRLQPKLQCAVHSFVTPGIPYLDEIGYRARDLREPGQGVAALLPLSSDGNPRRRPGLPKLKAQRRVRFPSNKGRGGPSSPPFHSAFLNWQHKNVWMVKKELSSYLGPLQYYPGSFGGAI

SEQ ID NO: 14769 - protein, 154 aa, Homo sapiens
  misc_feature (1)...(154): Xaa = X or * as defined in Table 2
RRVSSESRWRSLESRGRSLEIQGRMERPRCQRFRENSCVAPRHCKGPGGKGLQALFXVPVAQLGEPGAQLGDPGAHGEATVPEVQGEPAALLPGTAKPGGEGSPGFIPPRHCRGTGEEGSPGFTQGRETSKAQQRTGCLLSCRGCLCLSVSGDS

SEQ ID NO: 14770 - protein, 84 aa, Homo sapiens
  DOMAIN (27)..(82): Heat shock hsp90 proteins family proteins domain identified by eMATRIX, accession number BL00298E, p-value=8.500e-27, raw score of 27.30
  DOMAIN (1)..(84): Hsp90 protein domain identified by PFam, accession name HSP90, E-value=1.7e-22, PFam score of 88.2
  misc_feature (1)...(84): Xaa = X or * as defined in Table 2
DDEKKSKIEEVWVGSDEEEDNGKDKKKKTNKIKEKYIDWEELNKIKNIWIRNSDDITQEEYREFYKSFTSDXEDHLAVKHFSVE

SEQ ID NO: 14771 - protein, 179 aa, Homo sapiens
  misc_feature (1)...(179): Xaa = X or * as defined in Table 2
KRRGSFKMAELYQLPDESSSAKALVSLKEGSLSNTWNEKYSSLQKTPVWKGRNTSSAVEMPFRNSKRSRLFSDEDDRQINTRSPKRNQRVAMVPQKFTATMSTPDKKASQKIGFRLRNLLKLSXRHXWGILAKWFYSNIDKPLFEGDNDFCVCLKESFPNLKTRKLTRVEWGKIRRLMG

SEQ ID NO: 14772 - protein, 107 aa, Homo sapiens
  misc_feature (1)...(107): Xaa = X or * as defined in Table 2
FFLRWTLDTVTRGGIQWCNLGSPQPPPPRFKRFSCLSLSSSWDYRRPPPCPANFLYFXXRRGFTMLARLVLNPXPRDPPASASQSAGITGVGHRAWPMPIFENRFDL

SEQ ID NO: 14773 - protein, 151 aa, Homo sapiens
  misc_feature (1)...(151): Xaa = X or * as defined in Table 2
PRMISCRPTRPPTRPXSHSAPFRHFLLVHPVKAKYFLSAVMTTHHLASASHFPPFAAXSATFPAAPQPMWTSDLPQPPSTCLPLGTSPLPSRPLLPVSSCSSFPDPTQMPPLPSTFPGLPFLXPHSSALSLPLLXLPHGFALSPSSVPFPT

SEQ ID NO: 14774 - protein, 116 aa, Homo sapiens
  misc_feature (1)...(116): Xaa = X or * as defined in Table 2
LFYQTFSNVNXKTRHKMNKXTEDFNNTIEQLDLTVTFISLHSTVEYAILLITHATIFQIDHLLSXKTHLSKCSADGITQIIPNYDTIKQEVKNTNMSKNKXKLNNKFSNTLLFKRL

SEQ ID NO: 14775 - protein, 147 aa, Homo sapiens
  DOMAIN (71)..(120): Eukaryotic RNA polymerase II heptapeptide repeat proteins domain identified by eMATRIX, accession number BL00115Z, p-value= 8.805e-14, raw score of 3.12
  misc_feature (1)...(147): Xaa = X or * as defined in Table 2
SPFPPKNFYFSLRPLIFLRGVGPKLPPPKKRVFSKNPPEVFKSPPLKKKNFSFPPPVNLGPPKDLLKGPPPSSSSSSSSPSSSSSSSSSSSSSSSSSSSSSSSSSSSSSSSSSSSSSSSSSSSSSSSSSSSPDRERPPTIXNXPTRP

SEQ ID NO: 14776 - protein, 159 aa, Homo sapiens
  misc_feature (1)...(159): Xaa = X or * as defined in Table 2
DEVSLVAQAGVQWHNLGSLQPLLPGFKRSSYLSLLSSWDYRCPPPCLANFFIFSRDGGFTMLARLVLNSXPQCDLPASASQSVVITGVSHCARRAPSFXMSASGVTICVGWELFGMSHPVAEANDHLSGALVPFSALFSHFMPGLLPTMFCPPLRGCSE

SEQ ID NO: 14777 - protein, 149 aa, Homo sapiens
  misc_feature (1)...(149): Xaa = X or * as defined in Table 2
IDCWHKCQDNSMGKDNLFNXSYWDYWISIXKKRTSNLISPIHKIESRWIINLNVNSKALFRRKQRKTLHDCGLGNSFVEETQKALTNWDIIKLQSFCSSKYTTKKLKRXATDWGKIPTLFAKNNNDKICEHTHNKRRYMFGQMHVKWWA

SEQ ID NO: 14778 - protein, 210 aa, Homo sapiens
  misc_feature (1)...(210): Xaa = X or * as defined in Table 2
PGISADSRGQQKLSXWGPSHQPPPGPLKGSAPGGLCGLVGPGAAKHALRPSFHSGAPSAGNLGCFAAWASSLNSNQGSPPSSKGHIPKDRGEPRGTVPSLRKATATGRKAERLSDEGRSSVHGXAGIPGHEGNAKENRDRHPWQLPGIASAAVVIASGRGALPPGGQAGPQKLAPPFSSLSVPGGARWGXAEGAPSKQRGKVTGEPGRQC

SEQ ID NO: 14779 - protein, 130 aa, Homo sapiens
RNFRVDDLVSPRCCGILWFFTQGQASCWRPLATLPSRQKPGSSPGKAGCWPAWDLGLVPHGVSGVSIAASSTPQGQAVCSPSVAAPSTLLLLRTHLLGAASLQGCGHQILLHHLIGMDLYVAASPSHRFW

SEQ ID NO: 14780 - protein, 72 aa, Homo sapiens
VHTVCARHTAPHPRAPAASPGGHGDCPQPNPPTPQGGAPARSMQGWASPRPSPHEVAFTTGGGRREENSFEL

SEQ ID NO: 14781 - protein, 110 aa, Homo sapiens
  misc_feature (1)...(110): Xaa = X or * as defined in Table 2
HHHLAPFSSLPFNIVLEEVLARPINKEAKXKAPXLERKEVKLPLFAEEIQEMIWYIDNSKESTKELLELINKFIKATRYRFHIQXLVFLYTCNNLKXKLIKYLSINLTKV

SEQ ID NO: 14782 - protein, 141 aa, Homo sapiens
  DOMAIN (94)..(121): kw TRANSCRIPTASE REVERSE II ORF2 domain identified by eMATRIX, accession number DM01354L, p-value=7.857e-10, raw score of 11.73
  misc_feature (1)...(141): Xaa = X or * as defined in Table 2
NNALLNNPWVKGAIPKEVRPYLDTRENKVTAXQNLWDALKKXCSGKLIALKEXCQINNLSFPLKIPEKXEQIKSPVNIKKNVIFKKLKIKKGLKVXKKXRKISETKSWFLEKVIKIYXSQGRHARKKNEKSGITRDSRTRG

SEQ ID NO: 14783 - protein, 230 aa, Homo sapiens
  misc_feature (1)...(230): Xaa = X or * as defined in Table 2
YIYIYSYINIQFVLFLXEHLLINKFLSFVYQLMLKHXKKRTTNTLFTLIRTMXAFLFYYQIICISYVIAAVLFCIXIFFPXHLCLLVVLFMYFFNILRFIPLLRSDITSFHYMPLFGRFLSCXSKQEHLHNCQPGIYFINLLVWKHFFLDVIFTLVYYFVGFALILYDFLIMSVCXTFYLSLFISRACLLFYPHIXLIFIWAYISRLEIISFHTFXGIYTFASEIVFIIF

SEQ ID NO: 14784 - protein, 180 aa, Homo sapiens
  misc_feature (1)...(180): Xaa = X or * as defined in Table 2
TMLLFTLQNRCWTSSHCPMPAPALCPGKLTVGTGSMGPRSPWPPPSSANAXPVDKPSGQEGXGQCTAAAPPCRVAVSLSKVRAPGDGLSCGSSCPPGRQGRGVPCPAAGERREGREDLKPREXIGSCIKNKLGISPAKXDXKNSQDKSKKNPIGDRTSLAVGTVPQSTRPRVPLGYHYCY

SEQ ID NO: 14785 - protein, 176 aa, Homo sapiens
  misc_feature (1)...(176): Xaa = X or * as defined in Table 2
NLPNKXQDEGRGGGAEPPPPWPGSLPPRDVEAPSPPRLGAPAWPPAGRGWPPREGAWLGXVLCFRKRSPLPVLGVAGAXASVGGGCVGRCPLSGAWPPPGVGDKPSPYCSERPAASFPPRTCVFPNAEGGGERAPRDSRGEGSLPCCRGEERGQGGLKTTRINRFVYQEQARDFTS

SEQ ID NO: 14786 - protein, 247 aa, Homo sapiens
  misc_feature (1)...(247): Xaa = X or * as defined in Table 2
LEQITFSVATAMDSRFPDFQDLDLEPERACHDAAGTLEVDFFLFLNFGTVDLAGRKETTTEQALPPALLLGIRRPEFLSRPSVQTEDAPSKVNYVLCLLIAECSPGPSDYLPCAIPSAYRRWYLDFCPRXFLPPYYXRRHPFQWTTVTQEAFSHHDVAFTSTPVLFYPDSAQPFIVKSESSSQIAKAALSQQRPSLIYERALHFFSXSLQRHTIDLDQGIFXILMLSEERQHLFESSIGPHPTISKD

SEQ ID NO: 14787 - protein, 84 aa, Homo sapiens
  misc_feature (1)...(84): Xaa = X or * as defined in Table 2
ERSFSKKMPXNPPGGGEPPXPTLGIPSSPPPHLLGPKFLEKIFGLPGLPGGKIFPPGFAFGPNLGSGGEIPGGINPRSLPLGER

SEQ ID NO: 14788 - protein, 181 aa, Homo sapiens
  misc_feature (1)...(181): Xaa = X or * as defined in Table 2
GLLSNLLISIFFIPPKKSAPKYQHKMHSQSFHFYCFNTHFNFQLNKFFNELQKXHELKLEXSKIILYNQNKPSVTYREIMQLRAQLKKIIDSVKHKRTWQGLKQGVYWGFYVNVIGKSFFYFWDKYFIFIDWAKNTLRINMGPERPTVFLPNFIYSQSTKLALNWVINIMGQFIPSYSVSA

SEQ ID NO: 14789 - protein, 59 aa, Homo sapiens
  misc_feature (1)...(59): Xaa = X or * as defined in Table 2
FFVKGPKNTHWRKDSIVNKWCXKNXISTCRRMRLDTCLSLYTKIKXKLRPIEESGTEPR

SEQ ID NO: 14790 - protein, 152 aa, Homo sapiens
GVYVVPHTLVMMPLQANESLITTGCLREKPENSTAPWRVLPGCDRASGREDVPMAPPSVGGADNALARAARTACDQPWNLRLRLGPWDGSSQGLQLWTSDALPPGKKPPRRLSLPAATKAPSSNSFPTSVAGSTRLAPVELYSAERTSKRKE

SEQ ID NO: 14791 - protein, 101 aa, Homo sapiens
  misc_feature (1)...(101): Xaa = X or * as defined in Table 2
QTLALSPGLGVQWRDLGSPQALPPGFMPFLLPXASQISRDYRRPANLMPGPNFFIFQAETGFSTVLAPGWCDLPDLVIHSASASPSAGITGVSHRCPARTF

SEQ ID NO: 14792 - protein, 851 aa, Homo sapiens
  DOMAIN (738)..(750): ELECTRON TRANSPORT HEME PROTEIN C domain identified by eMATRIX, accession number PD02863A, p-value=7.609e-10, raw score of 10.08
  DOMAIN (89)..(830): Immunoglobulin domain identified by PFam, accession name ig, E-value=0.0043, PFam score of 15.0
  misc_feature (1)...(851): Xaa = X or * as defined in Table 2
MKVWLLLGLLLVHEALEDVTGQHLPKNKRPKEPGENRIKPTNKKVKPKIPKMKDRDSANSAPKTQSIMMQVLDKGRFQKPAATLSLLAGQTVELRCKGSRIGWSYPAYLDTFKDSRLSLYNSRGLLREGQAGPMGSQPKVNPPTMARVPQVEPPVGETWESSTLLADGAVDKRSSFALCSSFISTWKLATLNDPVHLLSLVCTWTLRTAGRSRTARHVAVAASRCGHLTFAWQNQYISLERLSVYMCRFVTWVNCMSRGFGVDYFIIQVLKLIQVLPPDSVHPRSHKHLLSLRSEIAKTTSYCPKHSSLSIPLPRNQMRSGVSVTLEQRSESTSSPFPVTALLFVNLTSWLGKGPILPKYVAVSVQLSRAGACFSDVTHREVLMSFCYMVVGGDFLLGGSLVCQVWFWFVVSRGYTLLIFSESREYLKEEEELFLCKGPGYAGQRVKKNDDPSSVKQNERYGQLTLVNSTSADTGEFSCWVQLCSGYICRKDEAKTGSTYIFFTESGGRISVLVNLVLTAQELLAHEPFDDVSRNSAPNLKHHLTVTQRRQVGKKAKKNYLFQEHCGENTRKHVIRIGVSLALKISLCKYCNIPSQNDPEKQRIQCTMPKKKSHQHQQKYPQKPSPEFLACPKDRIEKGELFVPSPSYFDVVYLNPDRQAVVPCPGDRAVGQSHAPQGIPSQGDPSQWNGHCLXHEAGLCVSATSFRAPGCGLLQGGGRGQISDLRQVPAALRGGPNNSSKPAFCSSCHMQAPWXVLAALSRRPQFPPLPSPPLPSLLGHQVTGIPSGPPSTTILASSNKVKSGDDISVLCTVLGEPDVEVEFTWIFPGQKPPSRVTGLWAGTWWCLYRVL

SEQ ID NO: 14793 - protein, 861 aa, Homo sapiens
  DOMAIN (640)..(660): PYRROLIDONE CARBOXYL PEPTIDASE SIGNATURE domain identified by eMATRIX, accession number PR00140B, p-value=7.067e-09, raw score of 11.99
  DOMAIN (89)..(845): Immunoglobulin domain identified by PFam, accession name ig, E-value=3.5e-09, PFam score of 34.6
MKVWLLLGLLLVHEALEDVTGQHLPKNKRPKEPGENRIKPTNKKVKPKIPKMKDRDSANSAPKTQSIMMQVLDKGWFQKPAATLSLLAGQTVELRCKGSRIGWSYPAYLDTFKDSRLSLYNSRGLLREGQAGPMGSQPKVNPPTMARVPQVEPPVGETWESSTLLADGAVDKRSSFALCSSFISTWKLATLNDPVHLLSLVCTWTLRTAGRSRTARHVAVAASRCGHLTFAWQNQYISLERLSVYMCRFVTWVNCMSRGFGVDYFIIQVLKLIQVLPPDSVHPRSHKHLLSLRSEIAKTTSYCPKHSSLSIPLPRNQMRSGVSVTLEQRSESTSSPFPVTALLFVNLTSWLGKESREYLKEEEELFLCKGPGYAGQRVKKNDDPSSVKQNERYGQLTLVNSTSADTGEFSCWVQLCSGYICRKDEAKTGSTYIFFTESGGRISVLVNLVLTAQELLAHEPFDDVSRNFAPNLKHHLTVTQRRQVGKKAKKNYLFQEHCGENTRKHVIRIGVSLALKISLCKYCNIPSQNDPEKQRIQCTMPKKKSHQHQQKYPQKPSPEFLACPKDRIEKGELFVPSPSYFDVVYLNPDRQAVVPCRVTVLSAKVTLHREFPAKEIPANGTDIVYDMKRGFVYLQPHSEHQGVVYCRAEAGGRSQISVKYQLLYVAGWMFSFLVMTLTENPSSPFQPNPSIVHSGAASVLDQQSQQFIQACFLLFLSHAGSMVSAAALSRRPQFPPLPSPPLPSLLGHQVRGIPSGPPSTTILASSNKVKSGDDISVLCTVLGEPDVEVEFTWIFPGQKDERPVTIQDTWRLIHRGLGHTTRISQSVITVEDFETIDAGYYICTAQNLQGQTTVATTVEFS

SEQ ID NO: 14794 - protein, 27 aa, Homo sapiens
MIDCVFGAELAESLSFILGILGFTFLL

SEQ ID NO: 14795 - protein, 181 aa, Homo sapiens
  misc_feature (1)...(181): Xaa = X or * as defined in Table 2
TNKSQGSQGLCVAGPRACPQSSPVQQKRNVPPLSILSAPFSGSXGLXPCGGVLGATGGAELMGLLRSWCPPGVCTVSLGQQVGSLSLESEPPASSLNNSRGLLREGQAASVGGQPKVTSPTMARVLXVEPPVCETWGPHPSWQMGPLPRGVWAGPPQTPPCGVTQLAANGKQPVRKPGSYP

SEQ ID NO: 14796 - protein, 123 aa, Homo sapiens
  misc_feature (1)...(123): Xaa = X or * as defined in Table 2
ISQPPKNLGPPKETYKRPPSSSSSKKEFPFFFPGESKGGVLSPRKGSSSRVKPFSAPTPPKKGGPRSSSSRGGKSSSSRNFKKKGGFPGXPRRFFFPGPGKPPPRPPKKAGHYRGKPPGPGPK

SEQ ID NO: 14797 - protein, 215 aa, Homo sapiens
  misc_feature (1)...(215): Xaa = X or * as defined in Table 2
QTLPFKGRLPQEDGLGIRRPSKRPALPWLCQGPAACPLPASLQVVPGHQMDPIQLVPPFLSPARPLLELXEGRQKGRWGRPSQAGGQEKQLSSSSASPTAERARPPRAGTYGXCLALPXVTGGVGPMASTLPVTTGMGQDSRGNRXEGPGVRXDWGCSPRERXEGGTGVALEERGLLQRQREKTSGVGVSEPGFVFQRPALPGPWVCPRLHKRLA

SEQ ID NO: 14798 - protein, 96 aa, Homo sapiens
  misc_feature (1)...(96): Xaa = X or * as defined in Table 2
MFCVSEVQKLXXXXXXXXXXXXXXXXXXXXXXXXFSLXXXXXXXXXXXXXXXXXXXXXXXXXXXXSSVVARLSLGVSSEFDAIQVPEFTDFTFSPF

SEQ ID NO: 14799 - protein, 286 aa, Homo sapiens
MNFSPLFPSNFGDFSQNISTPSEQQQPLAQNSSGKTEYMAFPKPFESSSSIGAEKPRNKKLPEEEVESSRTPWLYEQEGEVEKPFIKTGFSVSVEKSTSSNRKNQLDTNGRRRQFDEESLESFSSMPDPVDPTTVTKTFKTRKASAQASLASKDKTPKSKSKKRNSYSSWKSRVKNIRYESASMSSTCEPCKSRNRHSAQTEEPVQAKVFSRKNHEQLEKIIKCNRSTEISSETGSDFSMFEALRDTIYSEVATLISQNESRPHFLIELFHQLQLLNTDYLRQRAL

SEQ ID NO: 14800 - protein, 246 aa, Homo sapiens
  misc_feature (1)...(246): Xaa = X or * as defined in Table 2
KASAQASLASKDKTPKSKSKKRNSTQLKSRVKNIRYESASMSSTCEPCKSRNRHSAQTEEPVQAKVFSRKNHEQLEKIIKCNRSTEISSAHARRILQQSNRNACNEAPETGSDFSMFEALRDTIYSEVATLISQNESRPHFLMELFHELQLLNTDYLRQRALYALQDIVSRHISESHEKGENVKSVNSGTWIASNSELTPSESLATTDDVFIQEKXKYASQKHLHINVHSIFSHDSLKLKHQEING

SEQ ID NO: 14801 - protein, 118 aa, Homo sapiens
LFSPRQKGGEGNGAYFLLPGLLKKDSGCGCAAGDKRCNTGAAPDTATPSHRHGPICGSKSISSLLVKVSPVCKDSHSSLDLALLRRHKTPCHSAVAAAASASACAGLSGYAGSRFALR

SEQ ID NO: 14802 - protein, 111 aa, Homo sapiens
  misc_feature (1)...(111): Xaa = X or * as defined in Table 2
IYFPTPEKFGPPKETLKKGAPSSSSSKQKFPFFGPGGKQKGGFGSLQTLPPSRSSPFPPQPPQEKGFQGRSSSSGXICIFKKKGGFPGWAGGVQNPNPKGFGPPGPLKPWG

SEQ ID NO: 14803 - protein, 1003 aa, Homo sapiens
  misc_feature (1)...(1003): Xaa = X or * as defined in Table 2
YRIPGGGTWQSARPRVGSRRAVDGEGARRGLCSPSSRRWRPGPPQPHCPGPRAPALSCAAAAPARRPRGHAESRRDGGLGSAEEEESWYDQQDLEQDLHLAAELGKTLLERNKELEGSLQQMYSTNEEQVQEIEYLTKQLDTLRHVNEQHAKVYEQLDLTARDLELTNHRLVLESKAAQQKIHGLTETIERLQAQVEELQAQVEQLRGLEQLRVLREKRERRRTIHTFPCLKELCTSPRCKDAFRLHSSSLELPAAPGAGERAAADPGGGAALPGEPGAAAQGAGGARVHRGAAGVLGAGAPAVRDGGLSPACAGAGGRAAGAAADEAGQDLPTGSGTTTWPRPCSHPSRRPLRPTIPSPAAGTTWAPRTGSPHRQPLQATWCARAAATLRSTPSWPKTQPAGTRATSHCTPTALRKREHVHPAGGGRAVPRAAGEVRGAAEQVPAARGRSARRRRADLAPHLPGQLVEGPARGXGGPGXGQGRREEPEPARGGRGQAAGTEPARVQGALQRDLLQDPEDARLTSTPPKSRRTAASDPSPACSLPQGGSRGVPQAWAVQLPESERPLAACHHSTRPPDPKHAACSLLSGGSPPVLPPRSPWPPRASPKAQLXVQSQMSPPTPGIPQLPQPLASXPCASPSDSXPGFXKPFWISWLFFFFWLSLFFLRDLQCKVSLTPCRQLETLERGPQGQLFQGFPGPPTASPQPXCADIPLAPAVPPPGVLTRSEMSPAMQSRKASAGPGVSLLQPCQGQVSPWILLAHRRSVASQRRRRRSPSAEWCSFAQSLSPWLPTPEMTCWALSFPGAGAVGSPHSLPPPPTKPKLGLXLPSLCLPPSQGPXCLSHSTLPTGQPWHRSCLQPPESSGHAPPPVVPMSTPASPSLGTGVFAPCCIVVVLGWGXGTCSLPPSHKMPALHLPPLWGAFEDPAASGVLLQDVRKSSSAKRHPGPQLALSSPSGLLVPSAALPETLETRRAIQSVEGGGAPGLLHRDPKWEPFMPYLFLNG

SEQ ID NO: 14804 - protein, 63 aa, Homo sapiens
  DOMAIN (7)..(53): kw TRANSCRIPTASE REVERSE II ORF2 domain identified by eMATRIX, accession number DM01354O, p-value=5.861e-10, raw score of 8.73
  misc_feature (1)...(63): Xaa = X or * as defined in Table 2
SSNKKKPPNKNHPEPDSFKTEFYQTFINTPXIPILKLFQKTELQEILPNSFCEVSITNSSTRR

SEQ ID NO: 14805 - protein, 245 aa, Homo sapiens
  misc_feature (1)...(245): Xaa = X or * as defined in Table 2
PKGENGNLWCGASLLNARMRAGNKSPPLPRLPPGATKSLPQGALQFQPLLAEPDSAAGLGTGGTPRLTEVGGALSXXRSGSGFPENQKGPPDPASGYLDLMHTPPFSQDPISPASHMPIPSWSTLFSVEDRRSRQKTTPGRWGSRCGLPHTCSILVGGVTREGVEMLPMGTCGKCAPFAPHLSAASSNSVLTAGDPAPGAGRLGSAAQEAALGQGGGRRSQAPPRRALQRPHAWVETTSQWRSAG

SEQ ID NO: 14806 - protein, 129 aa, Homo sapiens
  misc_feature (1)...(129): Xaa = X or * as defined in Table 2
VGAIQRAPPAPPSCARCLHTPDIRATLTQTPGGLTPQQEKDHEHGHDGRAHSGAVSVWVLDPGTCSRRRRWFSPLYLELLRSSGECRGXSPASPSLSHHTAHVTPKAFIEHLLCARCKEDSGITGQGAF

SEQ ID NO: 14807 - protein, 79 aa, Homo sapiens [sequence omitted]

SEQ ID NO: 14808 - protein, 341 aa, Homo sapiens
  DOMAIN (212)..(229): Zinc finger C2H2 type, domain proteins. domain identified by eMATRIX, accession number BL00028, p-value=2.125e-15, raw score of 16.07
  DOMAIN (126)..(316): Zinc finger, C2H2 type domain identified by PFam, accession name zf-C2H2, E-value=2.1e-60, PFam score of 214.1
MRARRLPWALTLVAELGWDTQGGDQTSPGGNDRMSMEAECESTTVSPLSCSIPTGCGQTREEVSARATPPPSLGASLLQTLTPDTHCTGVSATIMSMLVVFLLLWPFSHSSTLAKHKRIHTGEKPYKCEECGKAFSRSSTLAKHKRIHTGEKPYKCKECGKAFRQSSTLTKHKIIHTEEKPYKCKECDKAFKRLSTLAKHKIIHAGEKLYKCEECGKAFNRSSNLTIHKFIHTGEKPYKCEECGKAFNWSSSLTKHKRIHTREKPFKCKECGKAFIWSSTLTRHKRIHTGEKPYKCEECGKAFSRSSTLTKHKTIHTGEKPYKCKECGKLLSTPQPLLNIK

SEQ ID NO: 14809 - protein, 484 aa, Homo sapiens
  DOMAIN (46)..(396): Immunoglobulin domain identified by PFam, accession name ig, E-value=9.7e-08, PFam score of 30.0
  misc_feature (1)...(484): Xaa = X or * as defined in Table 2
ARPSCPCSWSFSCCGVSPGALVTEAAIFYETQPSLWAESESLLKPLANVTLTCQARLETPDFQLLKNGVAQEPVHLDSPAIKHQFLLTGDTQGPLPLPLGLVHRMDPAEQAPWSXQGPKALFNSTPPTESLPAPWLSMAPVSWITPGPETTSRCRGVLRGVTFLLRREGDHEFLEVPEAQEDVEATFPVHQPGNYSCSYRTDGEGALSEPSATVTIEELAAPPPPVLSTMESPPRSCTLGNKVTLTCVAPLSGSGISSLRRGGERAAGNPGGSTSPDRIFFHLNAVALGDGGHYTCRYRLHDNQNGWSGDSAPVELILSDETLPAPEFSPEPESGRALRLRCLAPLEGARFALVREDRGGRRVHRFQSPAGTEALFELHNISVADSANYSCVYVDLKPPFGGSAPSERLELHVDGELAGHQRGRARVQCPSGPPVFPLFPWASDGGALGLGSAPIAYPGGEQAIGGRGSGDAWNFGLFPTDASP

SEQ ID NO: 14810 - protein, 436 aa, Homo sapiens
  misc_feature (1)...(436): Xaa = X or * as defined in Table 2
GEAGRGGSTGLGAGQGCATSQGLAARSSWGHRSVGHQLGSRGPTRSSAQXGAAAADLQGAGRHSDHNPPPTXAAXGXNLPAEEXGGPRAGAPAHASCPTDPSAGEPGTGAGAARRWHQPGLCSPSGVXPQASPGSSPRAQTQSPGAAQEHHEPREXAAQAGERPAGGSEVGAGASGGPAAGTGDACGNPGPAAAGSPRGGQGSRAATGHTGCGAVQLPRPAPSGRGXKCPAAAAAQETEGXVRPTAATLRLAGSGARRWCRPSASHHGPPDIPGGDSGGHPGSAPQPXAAAGPGCPQLPQEAGGSEPQAXRATGCLQGPGRCILGPDPPEAPGLLPQHPGRAGTGAGTAAGPGHDGXRATFXATGVRGPAPEAGTSTKSXGXGSWQVQGTPGKWGLCLQPSPSIQGPAATRPSPKGRAEQSSSASTEPSHPAPRKT

SEQ ID NO: 14811 - protein, 110 aa, Homo sapiens
  misc_feature (1)...(110): Xaa = X or * as defined in Table 2
ESLQTGLTFTKSDEMDLLPHIGPCRXDGVAVSGAPSSNSFPTSVAGSTRLAKERGDHHLRKQPRWEVHGAVRRAVHRPFIFHLSRKEAACCLFPPPTLLPSRQQTLPLSK

SEQ ID NO: 14812 - protein, 662 aa, Homo sapiens
  DOMAIN (280)..(318): Synapsins proteins domain identified by eMATRIX, accession number BL00415O, p-value=8.816e-09, raw score of 3.44
  misc_feature (1)...(662): Xaa = X or * as defined in Table 2
MWEPCGSQGDTGVFGCRDRXGGXGAAGCAGRPSPGDRGQWPHACGGGGRGHPSTSTGAPAGHGEEAASEQRLLSGGPLRPPGPHXAHRHVGPGAGRGLCXLGRREPQHRVPSRSAPAAPGRLPALPFLDEDKGXAEPREAAPRRPRAAGHSPGHVSHCGEAPGGLDHLHLPQSPAGMGSEHDGRSGQCXPSRHTSPPTRLQPSPPDTHPGGSSLPAPRPALSCWARVFASLGDQPAFLGGHTGPPDASGEPQHKHXPSGPLSSSSFPGAPIQGRQRTESLPGTCXGMEWPTAALGXRGPRPVTATPGTPGGAPTSGFPGCQAQKPEAGLVVANGTMCCPAKHTWRSGPKIPTLISILPLLLLHGGAVSLGSPPQGSALRPAPASLGPCVTDKSIPSLAQNTKYSPDLPXETXXHLPECSRGWGSPLLVLHPLLGHILVSAHIPLPGYKACPRPLNLLGRFGAQGPRGSLSRSSRGGXPGPAPSALGVSGSPSSHPPNGLYAEAHRMGFLPDSKSKNGLISKCKLTFHPQTSKPPAPISPXSKTSGGRKNRLPGLHSQQSFGRMPPGMPXAPSVYLLPLLSHPLPLRTAGKPSSLPQPRSPSLVSSHTRAQQLSLSVPXGQPCVPGHTSTRQGLPPHLSILPAELPQSSFANRGIKASLRIRK

SEQ ID NO: 14813 - protein, 124 aa, Homo sapiens
  misc_feature (1)...(124): Xaa = X or * as defined in Table 2
DRKEERLRSPRSGAAATRSSGGKGVAEWDPLPCLDPELWDQFDNLKNHSLEKFIISAKERTEIELSYTKQLRNLLKTCQPKRNWKEKEYITXNSPSLPVNKMSDHARQHXVITLGSIKLSSLRS

SEQ ID NO: 14814 - protein, 130 aa, Homo sapiens
  misc_feature (1)...(130): Xaa = X or * as defined in Table 2
PLDPQRVKIEDKVNKSRSSXKNLGLEDLGTYSVIVTDADEDISASHTLTEEELEKLKKLSHEIKNPVIKLISGWNIDILERGEVRLWLEVQKLSPAAELHLIFNNKEIFSSPNRKINFDREKGLVEVIIH

SEQ ID NO: 14815 - protein, 72 aa, Homo sapiens; identical to SEQ ID NO: 14651
  DOMAIN (41)..(62): kw TRANSCRIPTASE REVERSE II ORF2 domain identified by eMATRIX, accession number DM01354S, p-value=1.111e-13, raw score of 11.61
  misc_feature (1)...(72): Xaa = X or * as defined in Table 2

SEQ ID NO: 14816 - protein, 342 aa, Homo sapiens
  misc_feature (1)...(342): Xaa = X or * as defined in Table 2
CPLPFSLXYSTCGEKQPQMSWRASAASPGQSAPSSSAVGCWKASCKQYVWGTPSYSYTNRFPRRTPHSPGVWKACISRAGXPARKNSLICGLAGKTGALKDTSGKAPVFPLCHRHSDPGGGFHCAELGTGNSPLGRRLLKGLPXPAAVPCPPGAPHLPQRRPAGRPTXFPPAQSSPPQSVWSRSRCTRMPGPTGPGRWGPAAGSWPATSLASGCPSWEVCGATNPXAPRLSTALGSCCPSPPEGKRRPNTPATRPPCVPAGXAPPPGHSRGNGGLEKKSSFPASCGRXQSGAGPSRLDFPSSPSRLHSVPPGPFRFTSHPQVQASSVSEKGEKPLRSYDPRR

SEQ ID NO: 14817 - protein, 108 aa, Homo sapiens
  misc_feature (1)...(108): Xaa = X or * as defined in Table 2
KNQEQESEETLPNLFYKASITLIPKLDTSSSSSSSFSSSSSSSSPXKPITHRNIPSSSSSSSSSHQIQQYIGKIIHHDQVGCIPEHLIKFNIAAXXEPSKNGDRRNTP

SEQ ID NO: 14818 - protein, 110 aa, Homo sapiens
  misc_feature (1)...(110): Xaa = X or * as defined in Table 2
HASGKDRHTDQRNRIKNPETDTXIYSTFXQKCRLIXWRKDSLVNKWCXSNWASPMKKIKLDLSSSSSSSSSSSSSSSSVXNVKLLGNNVGGNLQYRGLRVHTVDVKAQHI

SEQ ID NO: 14819 - protein, 109 aa, Homo sapiens
  misc_feature (1)...(109): Xaa = X or * as defined in Table 2
LEAWAGLSQVQTPSKFLENPSQSYRLTVPLRKHVRPKKQHEIRRLAXVGNNLSDFTGXHPGCIRGLRPGHLSRLMDLGLGLMVKSMERDQRLVERAQRLDQELLQALEK

SEQ ID NO: 14820 - protein, 109 aa, Homo sapiens
  misc_feature (1)...(109): Xaa = X or * as defined in Table 2
KRDPRKTFITPPPVSGERQIRRGPTCKWGFLGLVGRGGPPEGEKSNLLLWNPGPPLGPNIKKGPRLTTPSSSSSNFQREKFHPGGGAPPXNPTILGRPGGPNKLGWGVP

SEQ ID NO: 14821 - protein, 119 aa, Homo sapiens
  DOMAIN (15)..(61): kw TRANSCRIPTASE REVERSE II ORF2 domain identified by eMATRIX, accession number DM01354O, p-value=5.657e-09, raw score of 8.73
  misc_feature (1)...(119): Xaa = X or * as defined in Table 2
RGEPPSPAPIGIFKSPKRGFPGPKTFPGGFLPKGKKKPGPIFPPGFLETKEGGTPPNPFKKARVFLVFKPKAGSSSSSSSPNYKPIYLNNTDTKFFNNMLANRIXQCIKEVMQYDRTRG

SEQ ID NO: 14822 - protein, 183 aa, Homo sapiens
  misc_feature (1)...(183): Xaa = X or * as defined in Table 2
LRVTAQWASHTLPDPVVGNPGSGWKEKDRDSEWGWRDLKSKTWVEVEAEGGLSGDTFQWLPQGSSQRPGLPLVNQGAGVQETKGAGPLXSPAPLPPGSPEGAQASGCSPVGAIGMYPLTGPLPPPPQPRSWISGPSTPILSLCPSPSTRSQGFPPQGLEVCVTPIELLPEVRLKIRECFPSFL

SEQ ID NO: 14823 - protein, 429 aa, Homo sapiens
  misc_feature (1)...(429): Xaa = X or * as defined in Table 2
FFFFFSCYAVNAAGNEGNDTALSFPERSQSRLCGFSQNTLCLLPAPTRSNFPGSCRPRQPPGSLPALALAAGDSPGEAGPPGEGSRGIQHTFPXIPRPRRVQGSQSSPSPTSHPQQFINGEGQTSXXQNLGLRTQEFECNPRLISRLXVVRFRSLFAFFPLFAFHSPSPPFFXGNVXARLQGQKMESLGAEGLHHRRPRQGWRKTKQKAPSAYVGKNGNPAPPWFPPKVFRTGAAKPXGFPNPISPKPXRHSLDLAKGRGPDPCARTGTLQSCLAFLWPSRELITPGCHVLIGLGSRLRGALFGGXGTAKRLSHKGRQSGPXNXPGRHTAPLIPSAASGRVRVGLQRNEPLPQNPTLRLSSPLLPGGIKVKETVGIXXGVGMRDLGSXNEVSAFIGNXESRGSGSSNRMVFLPLPNARESPPSRFETVN

SEQ ID NO: 14824 - protein, 117 aa, Homo sapiens
  DOMAIN (46)..(66): kw TRANSCRIPTASE REVERSE II ORF2 domain identified by eMATRIX, accession number DM01354W, p-value=3.777e-10, raw score of 12.64
  misc_feature (1)...(117): Xaa = X or * as defined in Table 2
QFSIEXKKRKIFPTQAXDKQRLNVQKYKILLVTRKEGPNGKRGKPCSXIRKLNIVKTSIFPKLIDSYNKFPNYLSASLLLELTSCILKLIWEQNPFMKMQRARTVKTLSKKKNKVEK

SEQ ID NO: 14825 - protein, 84 aa, Homo sapiens
  DOMAIN (17)..(49): kw TRANSCRIPTASE REVERSE II ORF2 domain identified by eMATRIX, accession number DM01354K, p-value=2.189e-10, raw score of 9.35
  misc_feature (1)...(84): Xaa = X or * as defined in Table 2
SMKKVERSKISILSFHIRKLENQLNPKXRRRREIKIGAEINEIENRKXIEKINETKSYFWKISKPLAKLIKEKTQITNTRNRAY

SEQ ID NO: 14826 - protein, 371 aa, Homo sapiens
  DOMAIN (91)..(204): Domain in Myosin and Kinesin Tails domain identified by PFam, accession name MyTH4, E-value=2.2e-24, PFam score of 94.4
  misc_feature (1)...(371): Xaa = X or * as defined in Table 2
WSHRDWICPASGFQMLNVGSVGQILRKKLMTYALXLLQLTVWRDSRLLCREGAPKXSLSSLPESRRQSSEFEKAKTCQLFINAAVDSPAIDYHISLAQSALQICLTHPELQNEICCQLIKQTRRRQPQNQPGPLQGWQLLALCVGLFLPHHPFLWLLRLHLKRNADSRTEFGKYAIYCQRCVERTQQNGDREARPSRMEILSTLLRNPYHHSLPFSIPVHFMNGIYQVVGFDASTTVEEFLNTLNQDTGMRKPAQSGFALFTDDPSGRDLEHCLQGNIKVKPSPFQEPSPTNSKEATLYKKSKLCKKFNSGVFQNFNQSNLHDKKKKMQDFVKPIEFLIHNLYIYTFHIKERKGVSNGNDTLSIRIIRVDM

SEQ ID NO: 14827 - protein, 71 aa, Homo sapiens
  misc_feature (1)...(71): Xaa = X or * as defined in Table 2
GDVEYXSIYSLAPIRHWLRNGPRASTLWLFFFFFFFFFETQSCSVTRLDCNGMISAHCHLRLPGSSDCPAS

SEQ ID NO: 14828 - protein, 193 aa, Homo sapiens
  misc_feature (1)...(193): Xaa = X or * as defined in Table 2
FLEGGWAHFFPPPKKGSFPKIPKEGFKTPPKRKKIFPSHPPLNLGPPRDLLKGPPHSSSSSSSPEVINIYCSPFREGHGRRXSKVSSWSTEVNKPVXDKFPHTPSYATPCPLPQGYRTAVFSYSPPKHMQSLPTFQKACSFPYSFSHHSDQSPTLVAPFFFPCLMRSSDKLMNDVPAPVFLPSFKGNHACSSR

SEQ ID NO: 14829 - protein, 113 aa, Homo sapiens
  misc_feature (1)...(113): Xaa = X or * as defined in Table 2
ENGWCWIATYGRTKTGFLSLTTCKSXLKRDLDLGTETMEILEENLGEVLLDIGLGKNFMTKTPKADSTEIKINRXDLIKLKSXCTAKKSXTXSNRQSTEWKKIFGNYASDRTS

SEQ ID NO: 14830 - protein, 72 aa, Homo sapiens
  misc_feature (1)...(72): Xaa = X or * as defined in Table 2
LYAHKFNNLDEMDQFLQRHNTPKLIQEEHRLTVIKXIKSIVINLPKQKAXGPDGFSGEMYQLLKEEIIYNVF

SEQ ID NO: 14831 - protein, 88 aa, Homo sapiens
  DOMAIN (5)..(50): kw TRANSCRIPTASE REVERSE II ORF2 domain identified by eMATRIX, accession number DM01354N, p-value=6.100e-19, raw score of 13.17
  misc_feature (1)...(88): Xaa = X or * as defined in Table 2
CILKDRCRXLYAHKFNNLDEMDQFLQRHNTPKLIQEETDLLSIKXIKSIVINLPKQKAXGPDGFSGEMYQLLKEEIIYNVFXRTDVEG

SEQ ID NO: 14832 - protein, 150 aa, Homo sapiens
  misc_feature (1)...(150): Xaa = X or * as defined in Table 2
KSREITTLANNQCMATESVDHELGRCTNSVVKYELMRPSNKAPLLVLCEDHRGRMVKHQCCPGCGYFCTAGNFMECQPESSISHRFHKDCASQFNNASYCPHCGEESSKAKEVTISLKQTPPRPWTPVPGQEXGSSLVGRADTTPGSGAR

SEQ ID NO: 14833 - protein, 111 aa, Homo sapiens
  misc_feature (1)...(111): Xaa = X or * as defined in Table 2
QKRGKTLPDFXSDFGXQLNGRHTHFQHPVVGNPGSGWKEKETKGAGPLCYPPSHSKVWGRGATSSVSEGGSQRAGHLPTSPAAQQGLECRNTRLPKVRAVAVRLCYPPLGG

SEQ ID NO: 14834 - protein, 136 aa, Homo sapiens
  misc_feature (1)...(136): Xaa = X or * as defined in Table 2
MHNPDGSASPTADPGSELQTLGQAARRPPPPPRGTRRPPQDTPISPETPGCFSRRPMPTREPPKTRGSRGHLHTHPPGPGPPLQGLAPRGLKTRRPPPSVPAPAGTPQGKDQEDCVXGXVALPGPPGRQEAYWSHP

SEQ ID NO: 14835 - protein, 471 aa, Homo sapiens
  DOMAIN (42)..(77): CORE POLYPROTEIN PROTEIN GAG CONTAINS: P domain identified by eMATRIX, accession number PD02059B, p-value=4.930e-09, raw score of 24.48
  misc_feature (1)...(471): Xaa = X or * as defined in Table 2
MDEAQPQEALGASDWQTCSRTQCLQRCKARSQSDHFKGELGVSSPRVHPQAARRPPPPPRGTRRPPPGPAHQPGNPXAASPGGRCPPGSPQRLAAPEGHLHTHPPGPGPPPPAGTPQGKDQEDCVXGXVALPGPPGRQEAYWSHPXGAXAXAPPSARLXAXVPASEQXEGTEPLCRSVPGPVRRVLGAPARGGVCTGKAQAAGGPAELPAPTPKPEGGPSCSPGLEGVXDEANGSWLPGQAGSLPLPEGXTEASQDSDPEIRXPRRTRPSARKPLSCFSRRPMPTREPPKTRGSRGHLHTHPPGPGPPPQPGPHKAKTKKIVFEDELLSQALLGAKKPIGAIPKGHKPRPHPVPDYELKYPPVSSERERSRYVAVFQDQYGEFLELQHEVGCAQAKLRQLEALLSSLPPPQSQKEAQVAARVWREFEMKRMDPGFLDKQARCHYLKGKLRHLKTQIQKFDDQGDSEGSVYF

SEQ ID NO: 14836 - protein, 139 aa, Homo sapiens
  misc_feature (1)...(139): Xaa = X or * as defined in Table 2
MHNPDGSASPTADPGSELQTLGQAARRPPPPPRGTRRPPQDPPISPETLSCFSRRPMPTREPPKTRGSRGHLHTHPPGPGPPVSLDREGVPRPGLXAKDLAPAVXGTPVFPTPRFNSRPRFPVAAAGTGAPRPQNQRPP

SEQ ID NO: 14837 - protein, 122 aa, Homo sapiens
  misc_feature (1)...(122): Xaa = X or * as defined in Table 2
FQQNLTLISAHCNLCLRFKXFSCLSWDDRHVPTCLDNFLYFWXRWGGFYHVDQAGLKLLDSSTPSASSFPKCWDYRHEPCTWPXKYSFLTEHXLLPVYXKXIAKPFGPKQIVKTFSXGCKNI

SEQ ID NO: 14838 - protein, 164 aa, Homo sapiens
  misc_feature (1)...(164): Xaa = X or * as defined in Table 2
EGDKGTPVLRGFSSVSGSWSRRMPPFLLLTCLFITGTSVSPVALDPCSAYISLNEPWEGTIDHQLDESQGPPLCDNHVNGGWYHFHGHGRGDAMPYLSFFTRKPLWEPTAPVWLNGSHPLXGDGIVQRQACASFNGNCCLWNTTVEVKACPGGYYVYRLTKPSV

SEQ ID NO: 14839 - protein, 55 aa, Homo sapiens
  misc_feature (1)...(55): Xaa = X or * as defined in Table 2
NRIENPEIKLNTDSQLILPRXFNWERDSLFNKCWWNWIFKCKTMKLDPFPIPDKN

SEQ ID NO: 14840 - protein, 226 aa, Homo sapiens
  misc_feature (1)...(226): Xaa = X or * as defined in Table 2
SSCLLAAFRGPAHASHCPXSPAHSSKRPIHAQLFPLVASPGPEIPQFGFARXSCCLPVPSPGPVLPPSWVYSPISXLKTTYFGSAPAQHLAAFVGLKLPQVKRSRPRSCCPGAFTGPATAXRWLPQAQVLPSPSLPRPSPCLTVAFPVHVTACYPTALTDQTLPSHWTVXDKLIRLPASPGQSSCLTLASIGPGAESAMVCLGPSHAFLKTLQATIWPDTCFCGPM

SEQ ID NO: 14841 - protein, 75 aa, Homo sapiens
  misc_feature (1)...(75): Xaa = X or * as defined in Table 2
VPTICQVMSXHFHPSSSSSSSSSSVINYYXFGLLLCQVAHFYNSIDQQMIQSQRPMMLQSALAFEQIIKVNGLLI

SEQ ID NO: 14842 - protein, 274 aa, Homo sapiens
  DOMAIN (226)..(239): PROTEIN ZINC-FINGER METAL-BINDI domain identified by eMATRIX, accession number PD00066, p-value=8.200e-16, raw score of 13.92
  DOMAIN (95)..(263): Zinc finger, C2H2 type domain identified by PFam, accession name zf-C2H2, E-value=2.5e-34, PFam score of 127.5
  misc_feature (1)...(274): Xaa = X or * as defined in Table 2
LVKKTCEVPLQAGRLYLDHHQSKPFLKLHSKTHVXRCPLGIQTTGPVTLRRAFNLRPVLSPQQRVPVEARPRKCETHTESFKNSEILKPHRAKPYACNECGKAFSYCSSLSQHQKSHTGEKPYECSECGKAFSQESSLIQHQRIHTGEKPYKCSECGKSLSARNANLTKHQANPHREEEALTGCSECEKAFSXLLSLVQHQRIHTGEKPYECSDCGKAFRHSANLTNHQRTHTGEKPYKCSECGKAFSYCAAFIQHQRIHTGEKPYRCAACGKA

SEQ ID NO: 14843 - protein, 102 aa, Homo sapiens
  misc_feature (1)...(102): Xaa = X or * as defined in Table 2
KLSFFHRESVNEIKKKTIDWENICNTYEXKPVTYKXFLQINXKEINDQIEKWTKATNRQIAEEEIQIVNKHIKRYCSASFRKKQIKTKKRCHFSITGKNYKE

SEQ ID NO: 14844 - protein, 98 aa, Homo sapiens
VFQRTSLQTFAILTLSCQGTQAYEERSIRSFANDDRHVMVKHSTIYPSPEELEAVQNMVSTVECALKHVSDWLDETNKGTKTEGETEVKKDEAGENYS

SEQ ID NO: 14845 - protein, 185 aa, Homo sapiens
  misc_feature (1)...(185): Xaa = X or * as defined in Table 2
HSLTATALTLGSLVFLHSSPCCAAGLWASDLPSVSLPLTQRRWLPFPKPXKWLGGXQRGPAPLVSCTPAPWFTQRERMKDGSISHAPSPTLRHPGVGGRSPRPLAWSPVGAIGMYPLTGPLPPPPQPRSWISGPSTPILSLCPSPSTRSQGFPPQGLEVCVTPIELLPEVRLKIKECLSLVSVKK

SEQ ID NO: 14846 - protein, 138 aa, Homo sapiens
  misc_feature (1)...(138): Xaa = X or * as defined in Table 2
RQGLDSVTQARVQWSDQGSLQPRSPGLERSSHLSLLSSWXFEISFRTLQQLVITGNILGHQKITGTNHRXFMLYSSFCLFFEMESHSVVQAGVQWHDLSSLQPPPLGFKRFSCLSLWSSWDYRHPSSCLAYFCIFGST

SEQ ID NO: 14847 - protein, 111 aa, Homo sapiens
  misc_feature (1)...(111): Xaa = X or * as defined in Table 2
SYPGAAVSPAPWSPGASPLRSSPELHLRLSSSASSLALAKNALSRASPSPAAQALPSPSPLLWPLTSSPGRQASPVAPPSASNGTXWGTCXPEAILGLQSAQPPGAPGPPH

SEQ ID NO: 14848 - protein, 120 aa, Homo sapiens
  misc_feature (1)...(120): Xaa = X or * as defined in Table 2
KTASPVQVKFCAGVALPNLKQRPLREKAQQCIXPLLMAFRNTGRIPCFSCNIPVLPGQKHGTEDYWFVQDLRATRQIFKAIYLVIPDAYTLFMTLTSELYWWSVLNLKDAFICIPLSPES

SEQ ID NO: 14849 - protein, 61 aa, Homo sapiens
  misc_feature (1)...(61): Xaa = X or * as defined in Table 2
NCSSVFCFPGSQRVGSILGKSWXGWVVATGVWLLNPLKAVGQEEYSLKMEGPRPEVTCRHL

SEQ ID NO: 14850 - protein, 1033 aa, Homo sapiens
  DOMAIN (619)..(825): Bacterial transferase hexapeptide domain identified by PFam, accession name hexapep, E-value=0.036, PFam score of 20.7
  misc_feature (1)...(1033): Xaa = X or * as defined in Table 2
MGSCSGGERLGTSPKYSMGKWEFVAKEQCGVPCPVQLGTLRNDSLEAQLHEYVKQGNYVKVKKILKKGSQPHSPRVHSLFTEGTLDPQAPDPCLMARETQNQDAPCPAPFMAEEASSPSTGQPSLCSFEINEIYSGCLILEDDIEEPPGAASSLEADGPNQVDELKSMEEELDKMEREACCFGSEDESSSKAETEYSFDDWDWQNGSLSSLSLPESTREAKSNLNNMSTTEEYLISKCVLDLKIMQTIMHENDDRLRNIEQILDEVEMKQKEQEERMSLWATSREFTNAYKLPLAVGPPSLNYIPPVLQLSGGQKPDTSGNYPTLPRFPRMVRDFQGGHFGKRSRKRNGCGWKPFTQVSKVNTGDQSEISHQLPTLCDPGKQNTDEQFQCTQGAKDSLETSRIQNTSRSLTDIQDLSSISYEPDSSFKEASCKTPKINHAPTSVSTPLSPELLKQQQGSSTVLHETQQVMEEALQMIKGTXKNKKLTVKKKIVVCFCPKKLKILERTQREPHSTLDEDLERWLQPPEESGSYKTFPRALKVAVRAAVPVLQDLDTMQYPLLGDPRLDQEQNHPAIPPPHLKSQKTQTLASHASSRQWKVSPPREESSTEEAVRASQGAEVGSSCFINPRCQIYSSVEFSRPEEXLTITNLRRXPTIQGPEPPRSQSSPXDFVLPKGXSSTNXAHPKNYDYXXDQISKESLSPRARKQLCLLQTIRQPQRRVPVEESETGPYGPIPSKPKALYRNMNLDSLLKLSVLKDSDGVHRVSARVDPESLHKYSAYPETKPSAKVLVSSQVESNVRTPIRGNSEVGRRVTISPGVPVSRANSPCDSSISVXGLPQVIHVCYSRAHLXTQTQKPPEITYMSQGPTPRYPELSQKPSIHAELELTPRPLPPRSLPRYGPDSSWWPLLNPEVETPQSQLTTPDFEPKCSPSLDLLLSGFKIDSSPFCEDLKFQREKASLSPPSPPKEFPSWAPLSEVPQTPKHTCKQPIQRFTAFFLAWGIPERGRFFGLHTIWVLNLEKLKVDSAVSSPVS

SEQ ID NO: 14851 - protein, 235 aa, Homo sapiens
  DOMAIN (15)..(32): Zinc finger C2H2 type, domain proteins. domain identified by eMATRIX, accession number BL00028, p-value=8.826e-12, raw score of 16.07
  DOMAIN (14)..(202): Zinc finger, C2H2 type domain identified by PFam, accession name zf-C2H2, E-value=1.5e-20, PFam score of 81.7
  misc_feature (1)...(235): Xaa = X or * as defined in Table 2
LTTHXIIHAGEKPYKCEKCGKAFNQFSNLTKHKITHTGEKSYKCEECGKAFIQSSTPSKQINDGEKPYNCEECGKAFNQASNLYXHKIIHTGEKPYKCEECDKAFNQSSIFTKHKKIHTGEKPYDCEKYGKGFNXSSVLNTHTIILTAEKLYKPVRCDSASDNISNFSNHKRNHIGEKSXKCGECNKVFKWLSHLIIGNIHIGKISYKXEQCGKVFNXYTLLHRKSFIFEKNCRN

SEQ ID NO: 14852 - protein, 227 aa, Homo sapiens
  DOMAIN (2)..(142): gag gene protein p24 domain identified by PFam, accession name gag_p24, E-value=0.00052, PFam score of 19.6
  misc_feature (1)...(227): Xaa = X or * as defined in Table 2
IVTADQLLGMGQWAAIRNQTMLNDEVIEQLWKCCLDAWDKIQDDDKLCPCFXQPSDGAQTXNRIPHFNCPIFKDAAEKSYPXIARANDLLXNLMAYEQVNPRLCQVAICPIKGKIPPGGDVLTSYIKVCEGVRGTLRTAMVMAQAMVSIRMPGQFPGKCFLCSQSGHSKRNCPWHTDRCSFQHQQPKFFQQQAPLSTICPRCQKGNHWVAQCHSKFDIDGNPLRSLP

SEQ ID NO: 14853 - protein, 114 aa, Homo sapiens
  DOMAIN (1)..(56): kw TRANSCRIPTASE REVERSE II ORF2 domain identified by eMATRIX, accession number DM01354Q, p-value=8.714e-17, raw score of 9.23
  misc_feature (1)...(114): Xaa = X or * as defined in Table 2
STVKGPCSMCRTIHHVPHIMGFIFGVQGWHDMCKSINVNHSVNRMKNKNHMIISNDAEKAFDKTXXSVSIKTLNKLEVKGMYLYIIKVAYDRLPARIIADDXRAESFPLRLGKR

SEQ ID NO: 14854 - protein, 120 aa, Homo sapiens
  misc_feature (1)...(120): Xaa = X or * as defined in Table 2
VFQSFFKHRNQKVPEPPPLSKTAKNLFAQLAENIASCLDDSSCYGYKKANIRDQWPXEAKELMPQDNFNXLFPQTDATRSSIWLLKTSIIKKYHVTHYEKALKTHEKELTCLRHDRVGTC

SEQ ID NO: 14855 - protein, 226 aa, Homo sapiens
WEALCQQKAAEAAPPTQEAQGETEPTEQAPDALEQAADTSRRNAETPEATTQQETDTDLPEAPPPPLEPAVIARPGCVNLSLHGIVEDRRPKERISFEVMVLAELFLEMLQRDFGYRVYKMLLSLPEKVVSPPEPEKEEAAKEEATKEEEAIKEEVVKEPKDEAQNEGPATESKAPLKEDGLLPKPLSSGGEEEEKPRGEASEDLCEMALDPELLLLRDDGEEEFA

SEQ ID NO: 14856 - protein, 86 aa, Homo sapiens
  misc_feature (1)...(86): Xaa = X or * as defined in Table 2
IGRPTKQGLGQWTAVWERMERTNKSRAWPNACEGPGAVGNYIAWASGLPXMLKTRAARTWVQAGVRESAQGFLNKNRRILEMGLSR

SEQ ID NO: 14857 - protein, 264 aa, Homo sapiens
  misc_feature (1)...(264): Xaa = X or * as defined in Table 2
KKIRPFFQIFDGFISNVLVFAQSGFPCCLPVAPSVTSXXLKAAVTAGLEVPSDVSDRAFEWLSAFPLDSPYSIHHPRRIQVFLKREGSSRRWVLEPITADSDPAYSSKVLLLSSPGLEELYRCCMLFVDDMAEPRETPEHPLKQIKFLLGRKEEEAVLVGGEWSPSLDGLDPQADPAGSWVRTAIRLCAGPELGIDLSAVTKWWRFAEVSVPAAGDPPGGLQTVVVYLPGCLDHHAYFGRKWEGPGAKQKAARGSSPNPGRHKG

SEQ ID NO: 14858 - protein, 69 aa, Homo sapiens
  misc_feature (1)...(69): Xaa = X or * as defined in Table 2
VNSSHRDQWNRIGGPETNAYIYGQLVFGKEAKFIXWRKNSLFNKWCWETWISLQKRMELDSYLTAYVKI

SEQ ID NO: 14859 - protein, 165 aa, Homo sapiens
  DOMAIN (63)..(93): Flocculin repeat proteins domain identified by eMATRIX, accession number PF00624I, p-value=3.400e-10, raw score of 9.10
  misc_feature (1)...(165): Xaa = X or * as defined in Table 2
RKDILYSWARRFNIVKMLMLLPKAIYRFTVIPIFLLQNDXTAFFAEMEKPVLKFIXSYRRPXIAKQSXSSSSSSSSSSSSSSSSSSSSSSSSSSSPVNSSHRDQWNRIGGPETNAYIYGQLVFDKEAKFIXWRKNSLFNKWCWETGFPYKKEXSVDSYLTAYVKI

SEQ ID NO: 14860 - protein, 69 aa, Homo sapiens; identical to SEQ ID NO: 14858
  misc_feature (1)...(69): Xaa = X or * as defined in Table 2

SEQ ID NO: 14861 - protein, 165 aa, Homo sapiens; identical to SEQ ID NO: 14859
  DOMAIN (63)..(93): Flocculin repeat proteins domain identified by eMATRIX, accession number PF00624I, p-value=3.400e-10, raw score of 9.10
  misc_feature (1)...(165): Xaa = X or * as defined in Table 2

SEQ ID NO: 14862 - protein, 132 aa, Homo sapiens
  misc_feature (1)...(132): Xaa = X or * as defined in Table 2
NVLIWEDCIAGQAEVLHDSYGIIIDWSPKGMFSMNCTSQSCPWPHYVQLVXTERSDSRNDKKYGKSSYYLETWQYSGPQPQMIWPAVGAKHKDLWKLLIAFDKIKIWEGKYTMPSQYNPNYILELVENNTIW

SEQ ID NO: 14863 - protein, 71 aa, Homo sapiens
  misc_feature (1)...(71): Xaa = X or * as defined in Table 2
YCNTIIVGDFNTPLSGMDRSSRXKTNKETSELNYTVDQRSLTDIYRTFHPNNLMIHLKELEKQGQTKSNIN

SEQ ID NO: 14864 - protein, 103 aa, Homo sapiens
  DOMAIN (36)..(82): kw TRANSCRIPTASE REVERSE II ORF2 domain identified by eMATRIX, accession number DM01354O, p-value=7.000e-12, raw score of 8.73
  misc_feature (1)...(103): Xaa = X or * as defined in Table 2
WKMGQLPGRPQLPQLSQEKILSLNSPNVFSSSPLKXXXNILPKKKRPDCFTHKFYQTFKEEIIPFLKTHQEFEKKEILLKSFYEGSVVXAAKLNADINKKTTH

SEQ ID NO: 14865 - protein, 117 aa, Homo sapiens
  misc_feature (1)...(117): Xaa = X or * as defined in Table 2
CRLGGLKGRSREQGAVIREGEDTLGSETEAGRPAGSLRQQQRRGRPWLNPVPGKHGVPTGEEHWAGEPAGWGGSVSGQAGXAESRLSSSGHSGQKGGAVMLLAADRRRGQRRRGGSG

SEQ ID NO: 14866 - protein, 77 aa, Homo sapiens
  misc_feature (1)...(77): Xaa = X or * as defined in Table 2
NHKTPEENIGEKLYDIGLNNDFLDMTPKAQAMKAKVDRWYGIKLXNLCTSKETINRINNRQPMELKKLMANHISDKR

SEQ ID NO: 14867 - protein, 109 aa, Homo sapiens
  DOMAIN (57)..(105): KRAB box domain identified by PFam, accession name KRAB, E- value=0.0038, PFam score of 5.1
  misc_feature (1)...(109): Xaa = X or * as defined in Table 2
QASGVSDLQXKLCACXAQSQDLRGGGFREARKTSTXQPGFGLLFCLLYSANKLQESVTFKDAAIDFSWEEGIQAESAQRMTVYGEVMVENYQEPGFLGKYLFQTRGGLP

SEQ ID NO: 14868 - protein, 77 aa, Homo sapiens; identical to SEQ ID NO: 14866
  misc_feature (1)...(77): Xaa = X or * as defined in Table 2

SEQ ID NO: 14869 - protein, 695 aa, Homo sapiens
  DOMAIN (604)..(624): GASTRIN RECEPTOR SIGNATURE domain identified by eMATRIX, accession number PR00527I, p-value=9.273e-10, raw score of 5.36
  misc_feature (1)...(695): Xaa = X or * as defined in Table 2
LSSPSQGRGADSAPGEFSGTQLPPQGGELVPQHLAQPHAVPAAEVGPAWWPGAGPXTSPSGRGRPRLCPPAPGPPLPLPAAGPGSHGQPPFMLLDGLPGPPGGSGASGLPGSSALPRPRGEGVTPGIRGEGLRHTGAGAPSHSHSTCPSRRWQAGCPPTLTAPPPPGWATSPPPPESRCRVSGTSRXAXNPGHAAASSGRWDRGPGAAAGPRPGXAHPAXGSGASGSSPGPEGGRARGTXPCSTEPSPGHXSTGPSPCPAGGPRGRLLLPLPGPDQGRWAPTSGIPLRTGPKLQTPTSCPGRKLAEGEAPGLMGVQVRQCEAQHTQRVPWLVVLQEGQDAVCVELEPVRVPAGPRGAADGRGCHRRQAPXRAGPGRRPLCSCTAGAAGSFPPAPRSGQGQGLLGLAPGTAAEQAAHRAEPPRCKMPAXPGPCVSTTCPCVSASELGTPGSEPLAGRWREAGSSQAVGLAAGGGGCXDQRTPAGFGSXGAGKGLRGPPGLVTSLSAVGRCASEPGGASGAAGRRGRSGSPREPRVGSGASRSPCGXAGCRRASSAGCRPRPGRAGSAGEKADTYSCCRAASGRPERPSRPGARSXTPVRVYTAGMVGGQGLATPGSPCCCPGPPGGRPRSRPESFPRADPSGYRGLPADRHWSKGPXGPALPGPGRSQAWALLGPQHPRSPAPAGAGRGRAGHRAR

SEQ ID NO: 14870 - protein, 85 aa, Homo sapiens
AGHHHWRKGPEAPRHEMCPGSSKNQGLVQGLAGGWGTKGKILKGSSTSPGEPGSGQIHLKKAGTCCGGSSKDRGVRNYSGRLLRR

SEQ ID NO: 14871 - protein, 83 aa, Homo sapiens
  misc_feature (1)...(83): Xaa = X or * as defined in Table 2
AGHHHWRKGPEAPRHEMCPGSRSGSEGATCFARGRXRPPGNSLNVSRMGTRSSYSCRRHSPAFLSWGKGRCHLCNKAHLLAGA

SEQ ID NO: 14872 - protein, 180 aa, Homo sapiens
  misc_feature (1)...(180): Xaa = X or * as defined in Table 2
TCCIQAAGTGGSGAPGLASVVGGAAPLWSSFXNSLPXQIRFALVPLPGCRAPGTFPAPLYSQWPFPGPQRWARSLARGEEGVGVLAPHPQPPTWPGRHGEQSPRRHHGVGHHHQHVMALGADMRRGLAAVAALVASXAGRVLGWCGRPARRAAQLGQEGAQGTVLALNGLFFFPSRRHGC

SEQ ID NO: 14873 - protein, 202 aa, Homo sapiens
  misc_feature (1)...(202): Xaa = X or * as defined in Table 2
AARRAGRPHHPKTRPAQLATSAATAASPRRXGRPWGRGLGPAWRPGGRGAALGAQRCGHGVRAVPVARAELGAAGFGGAAGPGAARGQCPALLPGRVEPRAARGVRTTPRPGQLSSQQAQPQRRARAAYPRREPXHADDDDLLHGADRSSRFGEVEHPVQGHTANPSDGGPVQQHQGHLPHRYHLHLLVXHSRPSGPPGATG

SEQ ID NO: 14874 - protein, 538 aa, Homo sapiens
  DOMAIN (234)..(261): C1q domain proteins domain identified by eMATRIX, accession number BL01113A, p-value=4.892e-13, raw score of 17.99
  DOMAIN (232)..(291): Collagen triple helix repeat (20 copies) domain identified by PFam, accession name Collagen, E-value=0.0002, PFam score of 22.9
  misc_feature (1)...(538): Xaa = X or * as defined in Table 2
GPRRXGRPWGRGLGPAWRPGGRGAALGAQRCGHGVRAVPVARAELGAAGFGGAAGPGAARGQCPALLPGRVEPRAARGVRTTPRPGQLSSQQAQPQRRARAAYPRREPXHADDDDLLHGAGGVSVPRGAPARWAAGGVGRGRRRPLLPWPGCERSFSSSLXIXHSQICFFXSSLEQCGEWEGVYGDPSDGGPVQQHQGHPASQPLPEWKVAEVTDGARSTEDTSWGKGAGGSSXEGGPSGPPGPPGAGGLPGHNGLDGQPGPQGPKGEKGANGKRGKMGATGXLXRYGWHLGGASFALLXAGHHHWRKGPEAPRHEMCPGSKGSFRENGHTPSKPAQSSEGQXLPHSPYQSGRWQKLLMGQGVQRTHHGAREQVAVPRKVDLLDHQDLREPAGCQDTTDWMDSLVLRAQKEKKEQMEKEEKWGLQDNYEDMAGISEELPLPCYEQAITTGEKAQKHQGTRCAQGARAASEKTGTHRPSQLNPQKASNYHWNYTAAMDRSYRIIIIIIHEHRCRIMMPIGLSWEVLQKCDSVLRPRQWA

SEQ ID NO: 14875 - protein, 60 aa, Homo sapiens
  misc_feature (1)...(60): Xaa = X or * as defined in Table 2
MXDSRGRXPGARTYRESPGPXXRMXGRSREIARWPRRRPLAPLLHRLLPSPRPGICGGAA

SEQ ID NO: 14876 - protein, 113 aa, Homo sapiens
  misc_feature (1)...(113): Xaa = X or * as defined in Table 2
RALPPPKDPSLLSSIGSYRVPAPESVEGPLSPWERKQPGERPLSCMSGLPQLRVGGVRGXXEPQGLPQDGDPAHTRCGAEPSLLDSLPQDGVQDAAAASFLHTPSQTPCVQRE

SEQ ID NO: 14877 - protein, 146 aa, Homo sapiens
  misc_feature (1)...(146): Xaa = X or * as defined in Table 2
PRVRPRVRQSSHLSWRCRVPPPPPTMCLSAHPAPGPDPGTSCESHRVIPMTSIAQWGNXVXRGEITCLKSQEGKSXGHGASCPMTGELKCPHCWGXTGPHQLPGMSHMFVCILRGLAGSPARTAARGFLEVAAFFKGTIPERKPLM

SEQ ID NO: 14878 - protein, 177 aa, Homo sapiens
  DOMAIN (105)..(119): NUCLEAR TRANSLOCATOR SIGNATURE domain identified by eMATRIX, accession number PR00785F, p-value=6.595e-09, raw score of 5.06
  misc_feature (1)...(177): Xaa = X or * as defined in Table 2
NTALSNEEILVMALVVISFLSLTFFQLMEGTRLNKLWGFIPIRTLXFSEXTLSSIKAKLLTILTPSLKFNREVKNEVCHFVEWFWSYHNNLIKMVPFISMFTPLNKMKAFRTFICKMTVNINNMHQSTIYAKGEEHLMGCYVNCKLRTACFMAFAVKKKLLAFNMYFKIYSCLGENF

SEQ ID NO: 14879 - protein, 157 aa, Homo sapiens
  misc_feature (1)...(157): Xaa = X or * as defined in Table 2
RALAAAERPLAPLLHRLLPSPRPGICGGAAXPWERKQPGERPFPVSQYLPSACGASPPGPLGTGRGHGADDAPRRTSXISEVGSVSVRDPGXIEQGSDGRLPIGHSRWDERGLRGLGFVTGKPWIKGGAILPVGPSKVVGLGYTGRGAGLARSLQGY

SEQ ID NO: 14880 - protein, 340 aa, Homo sapiens
  misc_feature (1)...(340): Xaa = X or * as defined in Table 2
FFFFFSCETTIENLIFFSGEVSNLILPIPVGHKGLXGGVKEEGCGCVLGLRPAVGSPAGMAQPSAPGVQAGSSILEEGLEVLSQPRAPSRGSQGPVSPPSWKVLQQPVRRTPTPHASWGKPTHASSFVGGLGAQGGKRMPLGGPGCRPAPGLGAHLYVVCPEFSAPIRGLRSGMVPLKKAATSXDTSGSSPGLGEPASPQLHLFNXSLRGASSVPLSTASPPEPGGLRTQALGRYXETGKWPFTGLLPLPRLSGPSTDSGAGTRXEPMEERSEGSLGERPARDPPGSVPTCGWRGRGSPGTCGLPGQRPLGRALRAAKTRPGTCRATDRGVPPGLPRLCR

SEQ ID NO: 14881 - protein, 121 aa, Homo sapiens
  misc_feature (1)...(121): Xaa = X or * as defined in Table 2
QWHRLAACSNLASAVSFRIFLYYGERRPSGGARPMLTSPSLTAWIINPLSQQLLXYLAAEQPQLHRGPPRTPAPVSGAEXRWTFLIARTHCLRRGQGRQPPPVSGATGAPSFPLQQPMPRR

SEQ ID NO: 14882 - protein, 36 aa, Homo sapiens
MRARRVVILNLRAFVHAVPSTKGALSSHHVNANVWI

SEQ ID NO: 14883 - protein, 57 aa, Homo sapiens
  misc_feature (1)...(57): Xaa = X or * as defined in Table 2
MEQLCTKVRRFKITTLLALILXXXXXXXXXXXXXXXXXXXXXXLFSILYEWYPCHLK

SEQ ID NO: 14884 - protein, 132 aa, Homo sapiens
  misc_feature (1)...(132): Xaa = X or * as defined in Table 2
SNLASAVSFRIFLYYGERRPSGGARPLLTSPSPTAWIINPLSQQLLXYLAAEQPQLHRGPPRTPAPVSGAEXRWTFLIAHTHCLRRGQGRQPPPVSGATGAPSFPLQQPMPRFTPGASSSHQEATKSSTREF

SEQ ID NO: 14885 - protein, 93 aa, Homo sapiens
  misc_feature (1)...(93): Xaa = X or * as defined in Table 2
CLRDGSPEPSCGLHCHCPACQXPTPHPHYKHRPAGESIPGNTPMSASRKRPASPTSRLRAPPALILSFLLCKMGTLPHASRGCWKERSEIVLK

SEQ ID NO: 14886 - protein, 231 aa, Homo sapiens
  misc_feature (1)...(231): Xaa = X or * as defined in Table 2
SIPCPSSSFSTWLQSSRNFTEDILASVLISASTQSAQSRSPQNQNLCKGGSQAAPPASSHPISSHGWGLCLDDPPAKDIIDFPLVLPGIPYAVSHQCRLQYGAYSAFCEDMDGDSSLISPWAKYPKQRPGQGVFIRVPKKHMQKGSACPLWPVRGKSLPVKMHNPGLAGRWKSSXSTWTIQSRSCGLHCHCPACQXPTPGPHHKHRPAGESIPGTTPNFCFEKEACVPYFM

SEQ ID NO: 14887 - protein, 468 aa, Homo sapiens
  DOMAIN (103)..(158): Speract receptor repeat proteins domain proteins domain identified by eMATRIX, accession number BL00420B, p-value=3.089e- 38, raw score of 22.67
  DOMAIN (102)..(408): Scavenger receptor cysteine-rich domain identified by PFam, accession name SRCR, E-value=4.2e-89, PFam score of 309.4
  misc_feature (1)...(468): Xaa = X or * as defined in Table 2
NRQLSCGTALSTTGGIYIGERSVRVWGHRFHCLGNESLLDNCQMTVLGAPPCIHGNTVSVICTGSLTQPLFPCLANVSDPYLSAVPEGSALICLEDKRLRLVDGDSRCAGRVEIYHDGFWGTICDDGWDLSDAHVVCQKLGCGVAFNATVSAHFGEGSGPIWLDDLNCTGMESHLWQCPSRGWGQHDCRHKEDAGVICSKFTAFRLYSETETESCAGRIEVFYNGTWGSVGRRNITTAIAGLCCRHLGCGGRNGCXPPCIHGNTVSVICTGSLTQPLFPCLANVSDPYLSAVPEGSALICLEDKRLRLVDGDSRCAGRVEIYHDGFWGTICDDGWDLSDAHVVCQKLGCGVAFNATVSAHFGEGSGPIWLDDLNCTGMESHLWQCPSRGWGQHDCRHKEDAGVICSKFTAFRLYSETETESCAGRIEVFYNGTWGSVGRRNITTAIARIVLQATLAVGEEMDANPSPL

SEQ ID NO: 14888 - protein, 371 aa, Homo sapiens
  DOMAIN (100)..(122): CHROMOSOME CONDENSATION REGULATOR RCC1 SIGNATURE domain identified by eMATRIX, accession number PR00633H, p-value=8.130e- 10, raw score of 15.10
  DOMAIN (1)..(346): Regulator of chromosome condensation (RCC1) domain identified by PFam, accession name RCC1, E-value=1e-27, PFam score of 102.1
GLVFSWGDGDFGKLGRGGSEGCNIPQNIERLNGQGVCQIECGAQFLLALTKSGVVWTWGKGDYFRLGHRSDVHVRKPQVVEGLRGKKIVHVAVGAQHCLAVMDSGQVYAWGDNDHGQQGNGTTTVNRKPMLVQGLEGQKIMCVACGSSHSVAWTTMDVATPSVHEPVLFQTARDPLGASYLGGRVYSHKFSPMTQSFQEWWYVNLNSLMDQALTPQCGSGEDLYILTGTVPSDYKVKDKSFTGSALAALVKGLPEALQRQFEYEDPIVRGGKQLLHSPFFKVLVALACDLELDTLPCCAETHKWAWFRRRPDDWNLSAGGSGTIYGWGHDHRGQLGGIEGAKVKIPSPCEALTTLRPMQLIGGEQTLCCDS

SEQ ID NO: 14889 - protein, 121 aa, Homo sapiens
  misc_feature (1)...(121): Xaa = X or * as defined in Table 2
WRESPHSARPRLEPQCYDLSSLQPPGLKXCSHISLPSSRDYSCCATMPSXIFCVFFGVEMRFHHVAKAGLKFPGSSNPPASGIPKCWDYRCILGQFSSFEAKPRMLIFTLFIICSGHVMMS

SEQ ID NO: 14890 - protein, 71 aa, Homo sapiens
  misc_feature (1)...(71): Xaa = X or * as defined in Table 2
VAFFKSAGASVQEKQAQLQEQVKEQRVCCQRLAHPVASAQKEPEAARGPGAPWAWGRVXQLYGPPEGEGRP

SEQ ID NO: 14891 - protein, 46 aa, Homo sapiens
GGGRDGTARDMPPECHQCPRTGPPMGPGYQGPLLLPADVPLVSSVV

SEQ ID NO: 14892 - protein, 57 aa, Homo sapiens
EWAEVPPPPHCPDVLLHRSAADRRPPAADRWPRTAAGDPGNGLAAAADSEPLGSSAP

SEQ ID NO: 14893 - protein, 93 aa, Homo sapiens
  misc_feature (1)...(93): Xaa = X or * as defined in Table 2
QRCPGGHIYSHKFSPNDSVLPGTVVCESPQPNGPGFDPTVWQWGRPIYPHRHSALRLQSXRQSGSPXVCLAGSLLCCPWRRLGHGLCQAHPGQ

SEQ ID NO: 14894 - protein, 240 aa, Homo sapiens
AAILYSGRLSSQPVVVESIHPYTYDTSTSGTVKIPGAEGLRVEFDRQCNTERRHDPLTVMDGVNRIVSVRSGREWSDWSSELRIPGDELKWKFISDGSVNGWGWRFTVYPIMPAAGPKELLSDRCVLSCPSMDLVTCLLDFRLNLASNRSIVPRLAASLAACAQLSALAASHRMWALQRLRKLLTTEFGQSININRLLGENDGETRALSFTGSALAALVKGLPEALQRQFEYEDPIVKGA

SEQ ID NO: 14895 - protein, 189 aa, Homo sapiens
  misc_feature (1)...(189): Xaa = X or * as defined in Table 2
GLSHGRNTGPLTTSQASTSPRGNNPRACVARTRVGVPATELLWMEEMRCVQLFCYSKARSQCSHQGXDVXVFYQPACWVSDTWHYLQPLTDSGXYAXKLSDXVMSGPILATGPCTSHLAXLLDSEPLERSVSSFCKWDVRLLGKTSLCCVGLEALSSSEIFNCLLGVFVWNLASCLCGSACCRVFLRDT

SEQ ID NO: 14896 - protein, 106 aa, Homo sapiens
KFLEQLFDDGDVYLLLLGSQAQQNNGTQQLLPKPGCSWWSCTIGCAVGLSRRGSSLASSWAEEVRLTSRRSPCLSAAPSSWGAGAPGPGSSAGLWAAARNFLCPLL

SEQ ID NO: 14897 - protein, 90 aa, Homo sapiens
  misc_feature (1)...(90): Xaa = X or * as defined in Table 2
KGRRVLWWGDKNHERSWHKGVMGQRVQDRQKRKLCQLMGKKRSQRAXILSGTEHLHVHSHLLCQQQVSTGRALHHLLPXRIWRARAKNEQ

SEQ ID NO: 14898 - protein, 693 aa, Homo sapiens
  DOMAIN (348)..(377): Regulator of chromosome condensation (RCC1) proteins domain identified by eMATRIX, accession number BL00625A, p-value=1.831e- 15, raw score of 16.21
  DOMAIN (258)..(411): Regulator of chromosome condensation (RCC1) domain identified by PFam, accession name RCC1, E-value=7.8e-24, PFam score of 88.5
  misc_feature (1)...(693): Xaa = X or * as defined in Table 2
SPRWSAPRSPSGAPSDASCDGLVPMNGRKMACWPVDIPKTDWSPNPWQEKREIVSSEDAVTPSAVTPSAPSASARPFIPVTDDLGAASIIAETMTKTKEDVESQNKAAGPEPQALDEFTSLLIADDTRVVVDLLKLSVCSRAGDRGRDVLSAVLSGMGTAYPQVADMLLELCVTELXNPRSRTPXCFSCRACDEEVSLALECWEPEELPRTQSPALTTQRAQNTMNKLNFHNRVMQDRRSVCIFLPNDESLNIIDKCLVFSWGDGDFGKLGRGGSEGCNIPQNIERLNGQGVCQIECGAQFSLALTKSGVVWTWGKGDYFRLGHGSDVHVRKPQVVEGLRGKKIVHVAVGALHCLAVTDSGQVYAWGDNDHGQQGNGTTTVNRKPTLVQGLXGQKITRVACGSSHSVAWTTVDVATPSVHEPVLFQTARDPLGASYLGVPSDADSSAASNKISGASNSKPNRPSLAKILLSLDGNLAKQQALSHILTALQIMYATDAAVGALMPAAMIAPVECPSFSSGAPSDASAMGXSPXMGEKCLLACXYSENRLSPNPWQEKREIVSSEDAVTPSAVTPSAPSASARPFIPVTDDLGAASIIAETMTKTKEDVESQNKAAGPEPQALDEFTSLLIADDTRVVVDLLKLSVCSRAGDRGRDVLSAVLSGMGTAYPQVADMLLELCVTELEDVATDSQSGR

SEQ ID NO: 14899 - protein, 1049 aa, Homo sapiens
  DOMAIN (251)..(273): CHROMOSOME CONDENSATION REGULATOR RCC1 SIGNATURE domain identified by eMATRIX, accession number PR00633H, p-value=8.130e- 10, raw score of 15.10
  DOMAIN (152)..(1026): Regulator of chromosome condensation (RCC1) domain identified by PFam, accession name RCC1, E-value=1e-27, PFam score of 102.1
  misc_feature (1)...(1049): Xaa = X or * as defined in Table 2
KCHLRAGRCRDVTAIFWLQSSFMDQLEEKADLRKSITFYQNQGGRAKDAALGGGHHQAGAQGGDEGEAAGAAADGVAAYSNYNNGHRKFLATAQNPADEPGPGAPAPQELGAAGKHGGLPNLRLSFKLALIRDMAILPFQWNLLISFNAVLGLVFSWGDGDFGKLGRGGSEGCNIPQNIERLNGQGVCQIECGAQFLLALTKSGVVWTWGKGDYFRLGHRSDVHVRKPQVVEGLRGKKIVHVAVGAQHCLAVMDSGQVYAWGDNDHGQQGNGTTTVNRKPMLVQGLEGQKIMCVACGSSHSVAWTTMDVATPSVHEPVLFQTARDPLGASYLGVPSDVNSSAASNKISGASNSKPYHPSLAKILLSLDGNLAKQQALSHILTALQIMYARDAVVGALMPAAMIAPVECPSAAASDAFAMASPMNGEECMLAVDIEDRLSPNPWQEKREIVSSEDVVTPSAVTPSALSASAGPFITVTDDPGAASIFAETMTKTEEVKRHSFFALYCEITKWQVEPQIDDPNSNLEEVINEAEAITSENSLGLISRWPRLFSQIQPDDSVLPGDGGTXISTAXWTRLXPHSVAVADMLLELCVTELEDVATDLQSGRLSSQPVVVESSHPYTDDTSTSGTVKIPVPSSARSSSLKENSCASARTPLTPDVRVLHTKRFSSSLDTPEVEVLLTSNAAHSPGAEGLRVEFDRQCSSEWHHDPLTIMDGVNRIVSVWSGPVEAWNRTQRTVPAVQLSGSHSSSPGVEGVVAGVILRLLVYSGSVSVKSKAHRLAVACVGTPAVAFWWVGLGGATLVCWLLMGWSLACETQGCLQCSFTGPKELLSDCCVLSCPSTDLVTCLLDFRLNLASNRSVVPCLVALLAACAQLSGLATSHRMWALQKLRKLLTTEFGQSININRLLGENDGEARALSFTGSALAALVKGLPEALQRQFEYEDPIVRGGKQLLHSPFFKVLVALACDLELDTLPCCAETHKWAWFRRRPDDWNLSAGGSGTIYGWGHDHRGQLGGIEGAKVKIPSPCEALTTLRPMQLIGGEQTLCCDS

SEQ ID NO: 14900 - protein, 144 aa, Homo sapiens
  misc_feature (1)...(144): Xaa = X or * as defined in Table 2
FFKNFYRINRDSYYKAAKFFPVLCISSFHSYCSTLPQAPLPQAWLNLRRSSGVFLLLISIVRADVPTPFQILGLILEAPPSQSYFLPFSSMDGLMLHPNRKVGQLTFSRPGEVAHTCNPSTLGGRGGRIAXGQEFETSLGSLIS

SEQ ID NO: 14901 - protein, 204 aa, Homo sapiens
  misc_feature (1)...(204): Xaa = X or * as defined in Table 2
AAATTTTKLAAARQPLPGGGGESAVGAGAGREVFIYLFATASAKRGGGRAKRTPGAQSSGRAVLPSLGPPGRFLAGVCXGSGGPSPFSSPPPNHSGQPGAGGEPGNRGPKMGVLAYSLHLXVPCGVSRNTLPAGDGNPVPXSPFLSFTWSPVPXPWGANGPWWADPPPSTHTVPXPSGPPGASGAGPPPSWPRPAKGFAPPRGL

SEQ ID NO: 14902 - protein, 47 aa, Homo sapiens
  misc_feature (1)...(47): Xaa = X or * as defined in Table 2
XAVLALRPWDVEAEQFLEVSFLLFFFLFSDPRPRDRLRLLERLREPT

SEQ ID NO: 14903 - protein, 200 aa, Homo sapiens
  DOMAIN (153)..(181): Dehydrins proteins domain identified by eMATRIX, accession number BL00315A, p-value=4.090e-09, raw score of 9.35
  misc_feature (1)...(200): Xaa = X or * as defined in Table 2
RDTSRNCSASTSQCRKASTAPGAEGDGPQASGRGGAVTTRGSRASSGRGRSVMPLCSRAXDVRARRRRSQARGSSGKLHLCSGKPLRKRSPCSRSVPAPGQSRGRRFTSSPPGFPASPSPCITERSRQKARRRTRSSSSSSSSSSSSSSSSSSSSSSSSSDGRKKRGKYKDKRRKKKKKRKKLKKKGKEKAEHSRQSIIR

SEQ ID NO: 14904 - protein, 113 aa, Homo sapiens
  misc_feature (1)...(113): Xaa = X or * as defined in Table 2
LKSAALSHGGAKQAGDPNLHPLPLRRDWAGPETNPRGKGHQHPSGFPLAPXNLPRLGRQRSSTGLGQRGPSGKQPSSHLEGQAVPSGRLAGEESTQDGRGTSQTDAGGWMAGM

SEQ ID NO: 14905 - protein, 238 aa, Homo sapiens
  DOMAIN (12)..(32): CORONAVIRUS NUCLEOCAPSID PROTEIN domain identified by eMATRIX, accession number DM01206B, p-value=8.767e-10, raw score of 10.69
  misc_feature (1)...(238): Xaa = X or * as defined in Table 2
AKGAGLEARGAMAHVGSRKRSRSRSRSRGRGSEKRKKKSRKDTSRNCSASTSQGRKASTAPGAEASPSPCITERSKQKARRRTRSSSSSSSSSSSSSSSSSSSSSSSSSDGRKKRGKYKDKRRKKKKKEEESLKEEGQRKKAEAQRGRASSASVVDPXDGAHQAYXREMDEGPKRKSXPKNDTERSTSQATQRGTADGHCQMQSDGYASREGPPHGQGPDGRQLAAQPGQVSGCQWEA

SEQ ID NO: 14906 - protein, 213 aa, Homo sapiens
  DOMAIN (161)..(200): kw TRANSCRIPTASE REVERSE II ORF2 domain identified by eMATRIX, accession number DM01354X, p-value=2.938e-19, raw score of 13.86
  misc_feature (1)...(213): Xaa = X or * as defined in Table 2
HALTTAFNIVLEVLVSAVRQEKEIKSIVIGKKEIKLSLFTDDMIVYVEYPKIDKNALLEIISNFTRVVGYKVNTQNSVTFRVYHQXASEYLKLKKILFALEPPKVEYLGSNLTKHAQDLYEKNCKTLIKEIKELNKWREILCGXKYSVFKMSVLLNFVYRFNAVPIQIPVSCFVGIEQTSLKFIWKAKRPRIANSILIENNKVTGLTLPFFKA

SEQ ID NO: 14907 - protein, 191 aa, Homo sapiens
  DOMAIN (18)..(31): PROTEIN ZINC-FINGER METAL-BINDI domain identified by eMATRIX, accession number PD00066, p-value=4.000e-12, raw score of 13.92
  DOMAIN (3)..(190): Zinc finger, C2H2 type domain identified by PFam, accession name zf-C2H2, E-value=1.5e-22, PFam score of 88.3
  misc_feature (1)...(191): Xaa = X or * as defined in Table 2
TSNECGKTFRHNSVLVIHKTIHTGEKPYKCNECGKVFNRKAKLARHHRIHTGKKHXKYEECDKVYIVNQVLKDRRIHTGEKAYKCKSCDKNLGRDSHLAQQTRSHTGEKPYKCTECGKAFSGQSTLIHHQAIHGIGKLYXCNDYHKVFSNTTTVSNHWRIHNERFXKCNKCGKFFRHCSYLAVHRXTHAGE

SEQ ID NO: 14908 - protein, 112 aa, Homo sapiens
  misc_feature (1)...(112): Xaa = X or * as defined in Table 2
GLXXNTTSPKISTEYISPXAKPPVMRGQDSVLYHSDYDEEEWNRVWANVGKSLSCSIAMVDKLIERDGGSEASGGINDGEKERSLTDAIPSLPREDWYEQLYPFILTLKECV

SEQ ID NO: 14909 - protein, 82 aa, Homo sapiens
  misc_feature (1)...(82): Xaa = X or * as defined in Table 2
RPLKHTLVTCDKGGLXFEPSFVSGPPRCAXGDGTKPEVPFIGTATFYHYLPTAYGCMLTSTXRKVEETELDDFYDGNSRRGR

SEQ ID NO: 14910 - protein, 115 aa, Homo sapiens
  DOMAIN (69)..(92): Immunoglobulin domain identified by PFam, accession name ig, E-value=0.00026, PFam score of 18.9
  misc_feature (1)...(115): Xaa = X or * as defined in Table 2
GWRLVRPLFMGHRQPVISGLQPEQPLHLKLXFLCSGVSDCASFPVQSPEPKVVFAKEQLARRKLQAEAGASATLSCEVAQAQTEVTWYKDGKKLSSSSKVCMEATGCTRRLVVQQ

SEQ ID NO: 14911 - protein, 68 aa, Homo sapiens
  misc_feature (1)...(68): Xaa = X or * as defined in Table 2
PAPTPGTWDYRHKSPCLANFLYFYXRQGFHHIGLAGLELLASRXSTHLGLPKCWDYRCEQHVQPENIF

SEQ ID NO: 14912 - protein, 68 aa, Homo sapiens
  misc_feature (1)...(68): Xaa = X or * as defined in Table 2
HREMKTGNDLKILQKVNKLWHLYTTAYXKRAIKKSKLLVHTKTWVNLKGVVLSEXSQSQRVKYWSTRP

SEQ ID NO: 14913 - protein, 220 aa, Homo sapiens
  misc_feature (1)...(220): Xaa = X or * as defined in Table 2
KGNQVSHEYSWKFRTLSLSXKQFXVLKRYYRRAVKLVNMSNIAEHPGFMKTGECLRCMFWNNLGCIHFAMSKHNLGIFYFKKALQEEXQCLCTAPVQVALIQVKNFQGRPMCTLLNPIRGYELLYNCGISLLHIGRPLAAFECLIEAVHVYHANPRLWLRLAECCIAANKGTSEQETKGLPSKKGIVQSIVGQGYHRKIVLASQSIQNTVYNDGQSSAIP

SEQ ID NO: 14914 - protein, 279 aa, Homo sapiens; identical to SEQ ID NO: 12255
  DOMAIN (84)..(130): Hexokinases proteins domain identified by eMATRIX, accession number BL00378E, p-value=7.818e-19, raw score of 22.92
  DOMAIN (102)..(273): Hexokinase domain identified by PFam, accession name hexokinase, E-value=2e-105, PFam score of 363.7
  misc_feature (1)...(279): Xaa = X or * as defined in Table 2

SEQ ID NO: 14915 - protein, 723 aa, Homo sapiens
  DOMAIN (131)..(186): Ferritin iron-binding regions proteins domain identified by eMATRIX, accession number BL00540B, p-value=9.368e-29, raw score of 18.82
  DOMAIN (67)..(174): Ferritins domain identified by PFam, accession name ferritin, E-value=2.2e-40, PFam score of 138.9
DKTSRGTIRQQHSRFTKIRCSAATAADTQANRVWSGPLANSNRPAAEGPRDPPASASQSAGITGVSHRLRFYFDHQDVAPECGAYFFHELAKEKRKGVERLLKMQNQRGGPAVFQDILKPGQDEWGKTLEAMEAAMAPGKNLNQSLLDLHALGSAPTDPHLCDFLESHFRDEEVTFMPRKSADLHAAGEAASLGGVSLNVMKGASLHALCLRLLNSFGPGVATLCGERVVHKNNRASALRKCIFWPVSLNSSRARPRQRTTAGGAVPTAALQRVIPASSQCLFPAPMGTTEATLRMENVDVKEEWQDEDLPRPLPEETGVELLGSPVEDTSSPPNTLNFNGAHRKRKTLVAPEINISLDQSEGSLLSDDFLDTPDDLDINVDDIETPDETDSLEFLGNGNELEWEDDTPVATAKNMPGDSADLFGDGTTEDGSAANGRLWRTVIIGEQEHRIDLHMIRPYMKVVTHGGYYGEGLNAIIVFAACFLPDSSLPDYHYIMENLFLPPGQQTTPGPVGLTQPAAGVEAGRVGTAGVLTLDPSMLGPCLLCPVSRYVISSLELLVAEDYMIVYLNGATPRRRMPGIGWLKKCYQMIDRRLRKNLKSLIIVHPSWFIRTVLAISRPFISVKFINKIQYVHSLEDLEQLIPMEHVQIPDCVLHDRQIILTTLCAYGEGEALASHLFHVILPFHIHSCFPSSTETSDPPCGPGLDLAYTTPFSTHFAQRGK

SEQ ID NO: 14916 - protein, 158 aa, Homo sapiens
  misc_feature (1)...(158): Xaa = X or * as defined in Table 2
HIKNMTFIYFSSFIFCFPPRWSLDSVAQAGVQWRDLGSLQAPPPGFTPFSCLSLLQSSWDLQAPRHRARLIFLYFFLVEMGFTTLARMVSISXPRDPPALASQSAGITGVSHRARPETYNFCSFIIISSLPVEPEARKMTKNSDIGEIWINLGTCLIV

SEQ ID NO: 14917 - protein, 119 aa, Homo sapiens
  DOMAIN (40)..(71): kw TRANSCRIPTASE REVERSE II ORF2 domain identified by eMATRIX, accession number DM01354G, p-value=7.181e-16, raw score of 11.57
  misc_feature (1)...(119): Xaa = X or * as defined in Table 2
SAIIVXDINTPIMGGTTRQMINKEIEDVNSAINQEDLLVIYRTLHTAAAEFTFFSSLHEVSSSIDMMLGHXTSLNKFXSIEIIQNISDHKGIKFEINNKEIXKIHKYVEISSTLLSKQG

SEQ ID NO: 14918 - protein, 290 aa, Homo sapiens
  misc_feature (1)...(290): Xaa = X or * as defined in Table 2
VIKAAEGDSGSAWVLDEADPTGGPGLGCRGTKYLLRSGAGGLSDGGPCGPGTDLALSPKPPGLHGPPSGPALAGXDLSRLLPRAHSENWPGAAGGGSHRAXVGSADQADNDTEGNNKDPGRPQAQPSCRGSLGPATGRSGWPYGSPXPTWGQGPVSTPREGPAGVRIEAKGKSNVGGTGGMAPSPSRTCNLLSLPKLSGVVXEAWNPGRADVHIMHAVGLIKTSHEWLDPPADSQAGSCGASGQEPQPAASGSAAWRRCSQGGLGRLRHQQQEEGPSSQHVGVGCVPCGG

SEQ ID NO: 14919 - protein, 123 aa, Homo sapiens
  DOMAIN (53)..(94): kw TRANSCRIPTASE REVERSE II ORF2 domain identified by eMATRIX, accession number DM01354I, p-value=5.071e-13, raw score of 15.55
  misc_feature (1)...(123): Xaa = X or * as defined in Table 2
ARXLFSRVNHMVGHKLSLNRFXKIDIIQSIFYDHNSMKLENNNKRKTGKFINLWRIIXIIYLXTTHKXKKKITREIEKYLEMTENRNKTYRNLWDAAKVVPKGEFIAIGASLXKGGKSPIQVS

SEQ ID NO: 14920 - protein, 124 aa, Homo sapiens
  misc_feature (1)...(124): Xaa = X or * as defined in Table 2
GTSAWPQYKLDNDSKXPENGTFEFSILQVLDNSCHKMGKWSEVPDVQAFFSHWSLPSLCSQCGLIPNLSSFSPFWSFGPPPQVPSPTESFFSMDSSDLPPSPQAAPRQAEPGPNSHLASAPPPY

SEQ ID NO: 14921 - protein, 122 aa, Homo sapiens
  misc_feature (1)...(122): Xaa = X or * as defined in Table 2
HEVKTMKILEENLGEYLLDLVGKDFINRTPETISXNKIYKFNFIKIKNFCSLKDILKEINRIDWEKIVTKHSDKGLVSRIKKFHDSVYKMRTQFFPPKDKDLGRYFTNKETXMVASGHLKMC

SEQ ID NO: 14922 - protein, 62 aa, Homo sapiens
  misc_feature (1)...(62): Xaa = X or * as defined in Table 2
DMGYDVTRFQGDVDEDLICPICRGVLEEPVQPCQTKVICIILGQVXGEAHDYHAPYCEHAFC

SEQ ID NO: 14923 - protein, 907 aa, Homo sapiens
  DOMAIN (606)..(642): 072 RIBONUCLEASE INHIBITOR domain identified by eMATRIX, accession number DM00315G, p-value=7.660e-09, raw score of 15.85
  misc_feature (1)...(907): Xaa = X or * as defined in Table 2
MGSAVPSQACLEALLLIVPWGACGVSQEEEESPAEGSKDEPGEQVELKEEAEAPVEDGSQPPPPEPKGDATPEGEKATEKENGDKSEAQKPSEKAEAGPEGVAPAPEGEKKQKPARKRRMVEEIGVELVVLDLPDLPEDKLAQSVQKLQDLTLRDLEKQEREKAANSLEAFIFETQDKLYQPEYQEVSTEEQREEISGKLSAASTWLEDEGVGATTVMLKEKLAELRKLCQGLFFRVEERKKWPERLSALDNLLNHSSMFLKGARLIPEMDQIFTEVEMTTLEKVINETWAWKNATLAEQAKLPATEKPVLLSKDIEAKMMALDREVQYLLNKAKFTKPRPRPKDKNGTRAEPPLNASANRAFPSPLTPWADQNVLSTVSPYPKILGKGETMVVPRVFGRMVGKSREAVAQAMVLEMFREEDYYNDDVLDQMGASILGVEGPRRHPDEPPEDEVFELFPMFMGGLLSAHNRAVLAQLGCPIKNLDALENAQAIKKKLGKLGRQVLPPSELLDHLFFHYEFQNQRFSAEVLSSLRQLNLAGVRMTPVKCTVVAAVLGSGRHALDEVNLASCQLDPAGLRTLLPVFLRARKLGLQLNSLGPEACKDLRDLLLHDQCQITTLRLSNNPLTAAGVAVLMEGLAGNTSVTHLSLLHTGLGDEGLELLAAQLDRNRQLQELNVAYNGAGDTAALALARAAREHPSLELLHEVQRNLNSWDRARVQRHLEHPSCGIWKIAGVPPLILGARPSCCEWRARAPSKSPLRRCPNSHPEPASVMXPAXTNLSIPWCCVASSLLRRCGSQSLXPSSHPAAVSMETYHVTLTLPPTQRGEEQVELSTIEELIKVPXSAPSQPXWSTSGLALPQEAWYPVRSHPXCPRLSQPSPDLTGYSYGSFGHLTWEMSWKAPRNCAV

SEQ ID NO: 14924 - protein, 131 aa, Homo sapiens
LSNNPLTAAGVAVLMEGLAGNTSVTHLSLLHTGLGDEGLELLAAQLDRNRQLQELNVAYNGAGDTAALALARAAREHPSLELLHEVQRNLNSWDRARVQRHLELLLRDLEDSRGATLNPWRKAQLLRVEGE

SEQ ID NO: 14925 - protein, 495 aa, Homo sapiens
  DOMAIN (182)..(204): AAA-protein family proteins domain identified by eMATRIX, accession number BL00674B, p-value=9.392e-09, raw score of 4.46
  misc_feature (1)...(495): Xaa = X or * as defined in Table 2
TNLSIPWCCVASSLLRRCGSQSLXPSSPPLPSPWRPTTSLXHCHQHREVKNKWSSPQLRNXSRMPXSAPSQPXWSTSGLALPQEAWYPREKPPMMPQAQPAIPRPNRLFLRQLRASHCGKWSWKAPRNCAVXLNSTTPCSRSGPSPRGLDPRWSGQKTWHLLGSQAXATTPGPLMELXELFNPDACGRRVQTVVLYGTVGTGKSTLVRKMVLDWCYGRLPAFELLIPFSSSLCQLVAQRYTPLKEVLPLMAAAGSHLLFVLHGLEHLNLDFRLAGTGLCSDPEEPQEPAAIIVNLLRKYMLPQASILVTTRPSAIGRIPSKYVGRYGEICGFSDTNLQKLYFQLRLNQPYCGYAVGGSGVSATPAQRDHLVQMLSRNLEGHHQIAAACFLPSYCWLVCATLHFLHAPTPAGQTLTSIYTSFLRLNFSGETLDSTDPSNLSLMAYAARTMGKLAYEGVSSRKTYFSEEDVCGCLGGWASGRRRSFSWLHIFRSGWP

SEQ ID NO: 14926 - protein, 412 aa, Homo sapiens
  DOMAIN (46)..(68): AAA-protein family proteins domain identified by eMATRIX, accession number BL00674B, p-value=9.392e-09, raw score of 4.46
  misc_feature (1)...(412): Xaa = X or * as defined in Table 2
PCDPREYPXXATSPTRRSWPWSISHPRPGSHPLALSQLFNPDACGRRVQTVVLYGTVGTGKSTLVRKMVLDWCYGRLPAFELLIPFSCEDVSSVGRAPASMCQLVAQRYTPLKEVLPLMAAAGSHLLFVLHGLEHLNLDFRLAGTGLCSDPEEPQEPAAIIVNLLRKYMLPQASILVTTRPSAIGRIPSKYVGRYGEICGFSDTNLQKLYFQLRLNQPYCGYAVGGSRVSATPAQRDHLVQMLSRNLEGHHQIAAACFLPSYCWLVCATLHFLHAPTPAGQTLTSIYTSFLRLNFSGETLDSTDPSNLSLMAYAARTMGKLAYEGVSSRKTYFSEEDVCGCLEAGIRTEEEFQLLHIFRRDALRFFLAPCVEPGRAGTFVFHRARHAGIPRCPLHCAGFAQDDPAKGGQGSG

SEQ ID NO: 14927 - protein, 125 aa, Homo sapiens
  DOMAIN (67)..(97): Flocculin repeat proteins domain identified by eMATRIX, accession number PF00624I, p-value=6.919e-12, raw score of 9.10
  misc_feature (1)...(125): Xaa = X or * as defined in Table 2
PFLPPYMKINSRXSKDINVNFKSGSSSSSSSSSSSSSSSSSSSSSSSSSSSSSSSSSSSSSSSSSSSSSSSSSSSSSSSSSSSSSFSSSSSSSSSSSSSSSSSSPLXKKNTPIKKWVKDMDRPRA

SEQ ID NO: 14928 - protein, 60 aa, Homo sapiens
  misc_feature (1)...(60): Xaa = X or * as defined in Table 2
KAEAGGWLEPRSSRPAWRREAGAGQSPGPGGRGCSELXLCHCAPAWTTEXDLASKKKKQK

SEQ ID NO: 14929 - protein, 126 aa, Homo sapiens
  DOMAIN (18)..(61): kw TRANSCRIPTASE REVERSE II ORF2 domain identified by eMATRIX, accession number DM01354T, p-value=3.195e-19, raw score of 9.48
  misc_feature (1)...(126): Xaa = X or * as defined in Table 2
YRKPTADNIINGERLDAFPLRPGTRQGTPFLLLLFNIVPEVLVRAIKQDLETIIIVIXIRKEEGKLSLCTDDMIFYVENPKEFIKILLEQISSQVAEYKINIQKSVVFLYTWNEQSKYEIKIISRA

SEQ ID NO: 14930 - protein, 84 aa, Homo sapiens
  DOMAIN (52)..(72): Prokaryotic molybdopterin oxidoreductas domain identified by PFam, accession name molybdopterin, E-value=0.0012, PFam score of 15.3
  misc_feature (1)...(84): Xaa = X or * as defined in Table 2
QHKNLVLXSGRRXLLSQQEESGIFFTLVITTFCWERXNRRILSQIXRMTGARIHFQEPVIPAPWEAKAGGSLEIRSSRPAWPTW

SEQ ID NO: 14931 - protein, 149 aa, Homo sapiens
  misc_feature (1)...(149): Xaa = X or * as defined in Table 2
KTGKEGPVRWLMPVILAPWEAKAGGSLEVRSSRPAWPTXXNPISSKNSKNIKISLAWWCTPVVLATEEAETXESLEPGGRGCSEPRSCHSTPAWVIGAPSQKKKKKEKQARRSWLAGHSGLHLYASYAGRCGRVGGLLEPRNSRAAWAT

SEQ ID NO: 14932 - protein, 81 aa, Homo sapiens
  DOMAIN (21)..(34): NEMATODE METALLOTHIONEIN SIGNATURE domain identified by eMATRIX, accession number PR00876D, p-value=8.000e-09, raw score of 5.77
  misc_feature (1)...(81): Xaa = X or * as defined in Table 2
CLCMSTCMCACVCVSVCMHICVCDCVCCVCVCACAYIXLRVCVLVCVFLYVCIFVSVIVCVCMCVCVRIYLAFPHKSLLLK

SEQ ID NO: 14933 - protein, 318 aa, Homo sapiens
  DOMAIN (19)..(56): Zinc finger, C3HC4 type (RING finger) domain identified by PFam, accession name zf-C3HC4, E-value=1.8e-07, PFam score of 28.5
  misc_feature (1)...(318): Xaa = X or * as defined in Table 2
DMGYDVTRVQGDVDXDLICPICSGVLEEPVQAPHCEHAFCNACITQWFSQQQTCPVDRSVVTVAHLRPVPRIMRNMLSKLQIACDNAVFGCSAVVRLDNLMSHLSDCEHNPKRPVTCEQGCGLEMPKDELPNHNCIKHLRSVVQQQQTRIAELEKTSAEHKHQLAEQKRDIQLLKAYMRAIRSVNPNLQNLEETIEYNEILEWVNSLQPARVTRWGGMISTPDAVLQAVIKRSLVESGCPASIVNELIENAHERSWPQGLATLETRQMNRRYYENYVAKRIPGKQAVVVMACENQHMGDDMVQEPGLVMIFAHGVEEI

SEQ ID NO: 14934 - protein, 71 aa, Homo sapiens
  misc_feature (1)...(71): Xaa = X or * as defined in Table 2
AIMAPNFPSXVKTXSQEDGQTPNRIKLKKSTSRHIIIIAENXLAKXNILKAVREKWLITCRRTVISMTMDF

SEQ ID NO: 14935 - protein, 75 aa, Homo sapiens
  misc_feature (1)...(75): Xaa = X or * as defined in Table 2
GGXGCSCSELXSCHCSPAWVTSKTLTQKKNPQFXQVVXNIXIPCLLIDFSEFGLFLPKSYCYQCKVTLQCSKSLL

SEQ ID NO: 14936 - protein, 72 aa, Homo sapiens
MLGIFEGLQINQLVETGLKRWLRLRNSFLKRFCYLLKSLSRSSRTTTTTAFVCDGRWIMQIPGSVLPFPQCW

SEQ ID NO: 14937 - protein, 257 aa, Homo sapiens
  misc_feature (1)...(257): Xaa = X or * as defined in Table 2
KENLITFPRIQPISKDDFRRYRGAIARKRIRLGRKYVISHKEEVPLCIHWDISKQASLSDSNVEALKKLAAKRGWEVTSTVEKIKIYTLEEHDVLSVWVEKHVVEVQHIXLIRLLSDFTKRPLWDPHFVSLXSHRLGXVKDDQLYHITCPILNDDKPKDLVVLRIHEGKPLKDGNTYHSVAVKSVILPSVPPSPQYIRSEIICAGFLIHAIXQQFMHSYLTLTICLLGILPYFGWEILGGLGPKSIGRKQQPLVYSS

SEQ ID NO: 14938 - protein, 101 aa, Homo sapiens
  DOMAIN (17)..(34): Zinc finger C2H2 type, domain proteins. domain identified by eMATRIX, accession number BL00028, p-value=1.900e-10, raw score of 16.07
  DOMAIN (15)..(93): Zinc finger, C2H2 type domain identified by PFam, accession name zf-C2H2, E-value=1.9e-10, PFam score of 48.2
  misc_feature (1)...(101): Xaa = X or * as defined in Table 2
RFTEHHRTLTGEKPYECKECGKRLSSNTALTQHQRIHTGENPFECKEXGKAFNQKITLIQHQRVHTGEKPYECKASGKAFSWCGRFILHQILHTQKTPVQA

SEQ ID NO: 14939 - protein, 124 aa, Homo sapiens
  misc_feature (1)...(124): Xaa = X or * as defined in Table 2
TGVTPAATQASWTPPPIDGPTTQEKLSXANTAPGTEGEQQVHGEKKEDPAVPSAPPXYEESTSGEGRKAWAFPPAPTGEPFHPNWAYVDPNSNSRYDNGVPTGDHELXTTFSWDDQKVRRVFVR

SEQ ID NO: 14940 - protein, 170 aa, Homo sapiens
AAPESAPRLPGRRFRRGGGKRRRQAAVTQAATRASGTPSPRDGTMTQGKLSVANKAPGTEGQQQVHGEKKEAPAVPSAPPSYEEATSGEGMKAGAFPPAPTAVPLHPSWAYVDPSSSSSYDNGFPTGDHELFTTFSWDDQKVRRVFVRKVYTILLIQLLVTLAVVALFTF

SEQ ID NO: 14941 - protein, 133 aa, Homo sapiens
  misc_feature (1)...(133): Xaa = X or * as defined in Table 2
FFFFNYITRYNKHYRYYKMSKKRCHKIFQMIDMLNAASCAALGRHSRWVLGGAHPTPPGSAQAPAPWSHAMGARTLPPRPFRSFGHSSATPKVSPSAAMPTEAQRPLPGCGPGSDFAGHPQCXPPQVQIPTSC

SEQ ID NO: 14942 - protein, 127 aa, Homo sapiens
KWWKVDCVGDMLECASIGRSEAFKTSSFQFSLATSEVCGHSSATPKVSPSAAMPTEAQQTPPGCGPGSALLGIRSADHPKCRSPLRVPPPPRSTSKVLAPFLASSDHLEHTCSSQVRLPAAVRGAST

SEQ ID NO: 14943 - protein, 350 aa, Homo sapiens
  DOMAIN (231)..(266): Prion protein domain identified by eMATRIX, accession number BL00291A, p-value=9.276e-09, raw score of 4.49
  misc_feature (1)...(350): Xaa = X or * as defined in Table 2
LANCRCVPGGHWMQEMVRELWMWNVEEEEHEVGICTWGGQHCGCPAKSLPGPHPGGVSAPQSASQLMVKLLVWQKSVHKLRKVSATSSIAVYPCPGQSSGGAESPAPGPGLAGWSHLCGAALAEVQAAPVSQAAVSDASLGPEWSQEGCRPGLTSGQHGGRDGRXRGSQRQGDPQSPSPGIPASSAALXVGLVLVKWRPVHKAYDPVPEASPLSANFRNPGPAEAPGPMGKTKGRGSAGGAGAGSAGLAPPPRSSQGAAGIGQXPGLPEEAVHPCKGSCPASSLSAGTPRAPPPHCPCLGPRRQGPCSHGVTPGCRSLGXAGGVGXAPPRTQREWRPRAAQEAAFNMSII

SEQ ID NO: 14944 - protein, 412 aa, Homo sapiens
  DOMAIN (284)..(295): Trp-Asp (WD) repeat proteins proteins domain identified by eMATRIX, accession number BL00678, p-value=1.000e-10, raw score of 9.67
  DOMAIN (123)..(411): WD domain, G-beta repeat domain identified by PFam, accession name WD40, E-value=5.7e-35, PFam score of 129.6
MNKQIQGRTGACSQRDTATLIKTESSDVIHLIMQYLKENGLHRALATLQEETTVSLNAVDSIESFVADINSGHWDTVLQAIQSLKLPDKTLIDLYEQIVLELIELRELAAVKDVEEEKFPTQLSRHIKFGQKSQVECARFSPDGHYLVTGSVDGLTEVWNFTTGKIRKDLKYQAQDNFMMMDDAVLCMCFSRDTEMLATGAQDGKIKVWKIQSRQYLRRYERAHSKGVTCLSFSKDSSQILSASFDQTIRIHGLKSGKTLKEFCSHSSFVNKATFTQDGHYIISASSDGTVKIWNMKTTECSDTFKSLGSTAGTDITVNSVILLPKNPEHFVVCNRSNTVVIMNMQGQIVRNFSSGKREGEDFVLYCFSTATGKLERTLTVHEKDVIGIAHHPHQNLIATYSEDGLLKLWKP

SEQ ID NO: 14945 - protein, 82 aa, Homo sapiens
  DOMAIN (5)..(51): kw TRANSCRIPTASE REVERSE II ORF2 domain identified by eMATRIX, accession number DM01354O, p-value=1.928e-21, raw score of 8.73
  misc_feature (1)...(82): Xaa = X or * as defined in Table 2
MVIXKLPYKKSQGLGTFTDEFYQILKEELISILLTLFQKIQKEXVTYKKSQGLGTFTDEFYQILKEELISILLTLFQKIQKE

SEQ ID NO: 14946 - protein, 55 aa, Homo sapiens
  misc_feature (1)...(55): Xaa = X or * as defined in Table 2
VYTKILRADRDMLTGYPCCSTGLLTADDXXXDNTLEVIALRRGPFYLEGLDLSPK

SEQ ID NO: 14947 - protein, 129 aa, Homo sapiens
  misc_feature (1)...(129): Xaa = X or * as defined in Table 2
PLQELGGQSLSLHYVGGRAPGPPAPGHPPVQSLQRPCVPTQQLLTPEFWCPALRQQQXGHRQGTGPVPTPGPPLKGQWQQGPPQKEWQMRPKAFGHHPGGLCQSLGGAPRRWNRDTYQAGPRQGCGALM

SEQ ID NO: 14948 - protein, 1176 aa, Homo sapiens
SGSGVRCALLGATCLFACVPLSSVALESRRAAPSLDMSYNYVVTAQKPTAVNGCVTGHFTSAEDLNLLIAKNTRLEIYVVTAEGLRPVKEVGMYGKIAVMELFRPKGESKDLLFILTAKYNACILEYKQSGESIDIITRAHGNVQDRIGRPSETGIIGIIDPECRMIGLRLYDGLFKVIPLDRDNKELKAFNIRLEELHVIDVKFLYGCQAPTICFVYQDPQGRHVKTYEVSLREKEFNKGPWKQENVEAEASMVIAVPEPFGGAIIIGQESITYHNGDKYLAIAPPIIKQSTIVCHNRVDPNGSRYLLGDMEGRLFMLLLEKEEQMDGTVTLKDLRVELLGETSIAECLTYLDNGVVFVGSRLGDSQLVKLNVDSNEQGSYVVAMETFTNLGPIVDMCVVDLERQGQGQLVTCSGAFKEGSLRIIRNGIGIHEHASIDLPGIKGLWPLRSDPNRETYDTLVLSFVGQTRVLMLNGEEVEETELMGFVDDQQTFFCGNVAHQQLIQITSASVRLVSQEPKALVSEWKEPQAKNISVASCNSSQVVVAVGRALYYLQIHPQELRQISHTEMEHEVACLDITPLGDSNGLSPLCAIGLWTDISARILKLPSFELLHKEMLGGEIIPRSILMTTFESSHYLLCALGDGALFYFGLNIETGLLSDRKKVTLGTQPTVLRTFRSLSTTNVFACSDRPTVIYSSNHKLVFSNVNLKEVNYMCPLNSDGYPDSLALANNSTLTIGTIDEIQKLHIRTVPLYESPRKICYQEVSQCFGVLSSRIEVQDTSGGTTALRPSASTQALSSSVSSSKLFSSSTAPHETSFGEEVEVHNLLIIDQHTFEVLHAHQFLQNEYALSLVSCKLGKDPNTYFIVGTAMVYPEEAEPKQGRIVVFQYSDGKLQTVAEKEVKGAVYSMVEFNGKLLASINSTVRLYEWTTEKDVRTECNHYNNIMALYLKTKGDFILVGDLMRSVLLLAYKPMEGNFEEIARDFNPNWMSAVEILDDDNFLGAENAFNLFVCQKDSAATTDEERQHLQEVGLFHLGEFVNVFCHGSLVMQNLGETSTPTQGSVLFGTVNGMIGLVTSLSESWYNLLLDMQNRLNKVIKSVGKIEHSFWRSFHTERKTEPATGFIDGDLIESFLDISRPKMQEVVANLQYDDGSGMKREATADDLIKVVEELTRIH

SEQ ID NO: 14949 - protein, 99 aa, Homo sapiens
  misc_feature (1)...(99): Xaa = X or * as defined in Table 2
KGPWKQENVEAEASMVIAVPEPFGGAIIIGQESITYHNGDKYLAIAPPIIKQSTIVCHNRVDPXWPQDTLLGDMEGRLFTALQKNPTEKKIPQALQQAN

SEQ ID NO: 14950 - protein, 273 aa, Homo sapiens
MARGSAGLVLGRGRLHDWQLGSGHSAPGMLGQVALAGRTELAVPSLDTPGGGEQRASDLSRTLSSSHESDHTVRAAHSPLPAEALTRSLPCLQNVAHVRLYIKCQLDFGGDSIAVGTPWYPMVWIPVVWIPVVWIPVVWMEHTVLIHLPVGGHVGSSHLSAPVNNVCGNVAEEPPALCGTKASKPPLTPPPIRSKAKFLGGSVCLGRHNKLSQTRWLKQQTFISHDPGGWKSNIKLTRPAQDLLMSVCMNCNTHGSEDMDVISHLIKIRLKPK

SEQ ID NO: 14951 - protein, 1079 aa, Homo sapiens
  DOMAIN (881)..(916): Prion protein domain identified by eMATRIX, accession number BL00291A, p-value=8.966e-09, raw score of 4.49
  misc_feature (1)...(1079): Xaa = X or * as defined in Table 2
SPASPAGRSAAHGSASPSGSPHPSWCTVGRSSCWSSPSPXASSGSGTPPTQPGRCSLGXMRRRPAGGAQAFQLKGKKWRRFGGWXPRWEAGCFQGEWXGATDSRTASNQLGPPHLQHLHINPPARQPPAFNRVVKQAPWRPQARAGAPGKPDDQDAHQRVLQNGHLGAQTQEEVAVTLGWPVVPLVVGLRLLCGTAPCAGSARSPRGELADGGDHSVEPPDGIPLDGEQSGSGMSGALPGSSFLLCPRRCRPPSPALXCPASWTRPGRRXCAPRSAPAGAARGLYPEGTPGSPTPHPRGRGTGSXTPSPGTAAPCAPAXAPGRRPGSXSRAWSAXXSPXLGPRGPQVVVLVGQQGPGAPWPGTWAPALSCAAVRYRGPACCSGSGRWRAHXRSPTXWWCPGCPCARSAAPXCTAXSGXGGPWAXGGSXSGVRXTSMSSEPCGCSSCRRTSAGPGPAGSAWGSAATSPASAPPAAAPPYSRRWRXGAAGGSWRRCRWAGAGSAGPAACPGHTPPRSPRALRTWAXAGPPGIGAQLLLRDQQLRLGCPPPPLREGCGLLPAPRSPATRPGLPLQQHAPGGHSGVEGPSGCCPQTSYSEGCPPRSAPPGSPRCTPXQRSRASSRPPRRRPXGGYRPAQTPGCSPWPXSXWRRPAAGGYTEPQXRPQWRRCWAXSWPGTXGSGRGCCQAWRGXPSAASRPRTARPRSCHRCPPAPAASISSSSTVGSTSIGTTDGSLIDGEMARFSATAASARPPQGTQRGCGGEFGAFGETGEGRGTGQRGRRIPLAPEGRPEGAGFSRVDAVFDSLAXPFEPRAMKSPGGGCPGGFGRGAGPAHRGGLGPVHPAPSLAAPGGCGVTSGPSRPERRRRHPATPESETDLTALEDPTSGTTGRKTVRREAGPEGGARGPPAPAXCLQRPMAAGGGLAGAARMWSGPGGSAARGRPGLPFTGGAGLPGKSSDPLASNERGPVPVPPPGRNSLLPEAGGCPGSMHQALAGWCPPAQAVLWRRGSQRLFTIAGCSCWARAPPGSEPPNMQTPASKQKLRGSXVGEQPSGWRLGSAFQQLSGGFCPAGADDTAGAGA

SEQ ID NO: 14952 - protein, 353 aa, Homo sapiens
  DOMAIN (104)..(124): kw TRANSCRIPTASE REVERSE II ORF2 domain identified by eMATRIX, accession number DM01354W, p-value=8.232e-21, raw score of 12.64
  misc_feature (1)...(353): Xaa = X or * as defined in Table 2
HMILCVENSKDSTKKNLLDLINEFSKVAGYRINIQKSMAILFTNNNLAEKSRKQCPFTDNIKHLRIHLTKKMKVHQYSLHTENHKTLMKYIEEDTNKXNDIPCSXIGRINVVKVSILPKAIYRFNAIPIKISSAFFTEIEKIIQFLWIHKRSQITKAILRKKNPGGIILPNLNLYYKTRVIKTIQYWHKRYTGQWKXPEINPNMYGXXIFDKSTKKTKWEKGSLFNKWCWDFTCKRMKLGPYITPYTKINPKWIKDLNVRTXSHKSRKENIRGKAPWTLGFGQCFLGYHTKTSGYKSNNKXMKLYQSKKLLHRTKTINKMKRQCTDKEKIFANHISGKVLIFRIXEELIQLNS

SEQ ID NO: 14953 - protein, 110 aa, Homo sapiens
  misc_feature (1)...(110): Xaa = X or * as defined in Table 2
TLLPEIQAYTQEQWLGSPEEATALAERLQQESAGPGLQMNGGLVLGAWVCLPPSSRPPAEPSTGAQSWVGGXEGPGGCGKVMVTGGSLVVLAWTAESEISSHTCVLRIVS

SEQ ID NO: 14954 - protein, 144 aa, Homo sapiens
  misc_feature (1)...(144): Xaa = X or * as defined in Table 2
HLFRQLFLEVLMSLQSPCLVAHSASRWCTAPVTADAPSLWRALALWLWLAHGQGPGTGWPVLSLRRRSASRLAASPSENPPSRNIHXSPQRPVCSRGPSGPATCPLGLPRTSPGATRPGPVSPLPSPRSGIAAAPGLAPASTPP

SEQ ID NO: 14955 - protein, 84 aa, Homo sapiens
  misc_feature (1)...(84): Xaa = X or * as defined in Table 2
KTMRSIRSFANDDRHVMVKHSTIYPSPEELEAVQNMVSTVECALKHVSDWLDETNKGTKTEGETEVKKDEAGENYSKDNGXRTL

SEQ ID NO: 14956 - protein, 245 aa, Homo sapiens
GRAGACSLIDTAMSIEIESSDVIRLIMQYLKENSLHRALATLQEETTVSLNTVDSIESFVAELKSGHWDTVLQAIQSLKLPDKTLIDLYEQVVLELIELRENLGAARSLFETRPDPMIKLKQTQPERYIHLENLLARSYFDPREAYPDGSSKEKRRAAIAQALAGEVSVVPPSRLMALLGQALKWQQHQGLLPPGMTIDLFRGKAAVKDVEEEKFPTQLSRHIKFGQKSHVECAPRAEFVQRRSN

SEQ ID NO: 14957 - protein, 244 aa, Homo sapiens
  DOMAIN (68)..(89): GLUCOSE TRANSPORTER SIGNATURE domain identified by eMATRIX, accession number PR00172C, p-value=8.254e-09, raw score of 9.51
  misc_feature (1)...(244): Xaa = X or * as defined in Table 2
FRSSVSPGSGPPFSVSVTGSGCPSXXHSGRPGVLVLKLPGQSXASLPPAFPGGSDVAAGRGLSSAADCFSLTGLGTLATPVLFLTSNLKLLQESVPKXLNSASSPGVPRPXLQMHRLCGGPRSLAVVGTRPGARNWLASAFSVGGGQLLGLQHPLQKIPPSRNIHXSPQRPVCWKAGRRKTKPRVDLQALETCPLGLPRTSPGATRPGPVSPLPSPRSGIAAAPGLAPASTPPLSPGPTPPLPP

SEQ ID NO: 14958 - protein, 443 aa, Homo sapiens
  misc_feature (1)...(443): Xaa = X or * as defined in Table 2
QWLSLLPLGLGEDTKSLRANTSNLELHSQATIWEEGGPTSSSLWRPFNFPGSPTNRNPKLMPAVQPPHPSGXTPSVTWLHISWRWSPXGQSKASLPLPLPWNSTCYPQTNKETKTQSALSTPSTNCNQPKERRPVCLPWVPPTSCSSTDREPPAWAHSTDPPSCDGTAKVPSSAGSKLGRKHHPRAAVGSLGASSHNLKAMGEEPTLVTALRGSKVTTVSETTRPRKKLSTDQYTXAPPTGSHPKASTPKIRCCVSPFSRCYEEIPETGXLIKERGLIDSQFHMAGEPSGNLQPWRKAKEKQAPSSQSGRTEXVPAGEMLDTYKTIRSHETHSLSREQHGENHPYDPITSTWSHPXHVGIMGITIQGEIWVGTQSQTISLTYPSPXNQTKEVSNKXRPPYGRREDQPLPPCGGLSTSLVPQQTGTPSSCQQCSRPIPVAEHPQ

SEQ ID NO: 14959 - protein, 96 aa, Homo sapiens
  misc_feature (1)...(96): Xaa = X or * as defined in Table 2
LACYSPPFGGPPSSPPPRAGGSNPPGPPGLTPFPPKKAKKLLRPSSSPPLFPPLGRVGPGDSFYPGGEGFPXPRVPITXNWGPFPPPRGTKKKLPF

SEQ ID NO: 14960 - protein, 268 aa, Homo sapiens
  misc_feature (1)...(268): Xaa = X or * as defined in Table 2
DRVSLLLPRLECNGAISPHCNFRRPGSSHSLASASRVAGITGVCHHAXLIFVFLVEMEFHHAGQAGLELLTSGDPSPPWSPKVYRITRHGATATWPYIFKNFYPTRPSXNSLSLKRTSXIQMPALXMERLQFVCPSLAEDLTKFXEKQDSKFTSQNRENXAFSRRSXGMLEKDXKWTTSDIVXVFVLFKSHVEMLSPVLEVGSSRRFLGHGGRSLMNGWVLSLWXXVSSYSISSCESWFXKESSVFLTFLLLPFWPCDMPAPPLRLPP

SEQ ID NO: 14961 - protein, 137 aa, Homo sapiens
  DOMAIN (50)..(91): kw TRANSCRIPTASE REVERSE II ORF2 domain identified by eMATRIX, accession number DM01354I, p-value=9.250e-33, raw score of 15.55
EIQLVLSLKTSLNKFKKIEIISSILSDHSGIKLEINSKGKLQNHANTWKLNNLLLNEHWVKNKIKMEIKTFFELNDNNGTAYQNLWDTAKAVLRGKFTALNAYIKKYERAQTDNLRSHLKELEKQQTKPKSSRRKKK

SEQ ID NO: 14962 - protein, 367 aa, Homo sapiens
  DOMAIN (133)..(174): kw TRANSCRIPTASE REVERSE II ORF2 domain identified by eMATRIX, accession number DM01354I, p-value=6.745e-34, raw score of 15.55
  DOMAIN (213)..(289): Ribosomal protein L21e domain identified by PFam, accession name Ribosomal_L21e, E-value=0.0055, PFam score of -9.4
HQNLSTCACFSSTCTGIRMMQRRLAWSLHKDDAQIREVFHIKTKKKKKQLQQNPPKETLSSDTPSPAPTQWSYPTHPVHGTFSKTDHMIGYKASLNKFKENEIISSTLSDHSGIKLEINCKRKLQNYANTSKLNNLFLNDHWLKNEIKMEIKKFFELNDNSDTAYQNLWDSAKAVLRGKFIALKAYITKSERAQTDNLRIKNKNHMIISIDAEKAFDKIQHPFMIKTLSKIGIQRTYLNVIKAIYDEPTANIILNGEKHAVGIVVNKEAKGKILAKRINVRIEYIKHSKSQDSFLKRMRENDQKKEAKKRGTWVQLKCQAAPPREVYFVRTNGKESGLLEPIPYEFKHNRCKNIKDLWTVKMFLFIK

SEQ ID NO: 14963 - protein, 134 aa, Homo sapiens
  DOMAIN (70)..(90): kw TRANSCRIPTASE REVERSE II ORF2 domain identified by eMATRIX, accession number DM01354U, p-value=2.250e-13, raw score of 12.24
  misc_feature (1)...(134): Xaa = X or * as defined in Table 2
VLEVLTRAVRQEKEIKGIQIGKEEVKLLLFADDMIMYLENPKDSSKKLLGLMNEFSRVSGYKINVHKSVALLYTNSDQAENQIKNSAPFTVVSKKKXLNDXIKYLGIHLTKEVKDLYKENYKTLLKESIDDISK

SEQ ID NO: 14964 - protein, 140 aa, Homo sapiens
  DOMAIN (29)..(60): kw TRANSCRIPTASE REVERSE II ORF2 domain identified by eMATRIX, accession number DM01354G, p-value=1.961e-10, raw score of 11.57
  misc_feature (1)...(140): Xaa = X or * as defined in Table 2
RVECVVGLEYDRSAAASNTITQVVVTHIQALSHEQSAAYTSFSNKHESFSRIHLLLGHKLGLNHFXNVGIMPNIFSNPNRITLEINTRSKTEKSTNLWKLNNTLLNSQQSREEIPREKENTXNENENAAAQHLQDAAKAA

SEQ ID NO: 14965 - protein, 113 aa, Homo sapiens
  misc_feature (1)...(113): Xaa = X or * as defined in Table 2
RMGTCVNPRSLKGFGPRPGGKKKPQSSPLKSSPKMALMGGNPGGAPPFFRFLFFNFRFGPKKSSSPAPIFFFLKKGLXINFGPPREPGGFNQKPQFPSAPGFEPWNPPQGPKP

SEQ ID NO: 14966 - protein, 136 aa, Homo sapiens
  DOMAIN (70)..(84): Thyroglobulin type-1 repeat proteins proteins domain identified by eMATRIX, accession number BL00484B, p-value=1.982e- 10, raw score of 9.04
  DOMAIN (53)..(111): Thyroglobulin type-1 repeat domain identified by PFam, accession name thyroglobulin_1, E-value=1.5e-13, PFam score of 58.5
VWCNSLRHLTNTMETIDWKDFESWMLHWLLYEMSRHSLEQKPTDAPPKVLTKCQEEVIHIRAVHPGSFKPKRDENGNYLPLQCYGSIRYCWRVLPNGTEVPNTRSRGHHICSETLELEDPSSGLGGTKHDLGPVPM

SEQ ID NO: 14967 - protein, 98 aa, Homo sapiens
  misc_feature (1)...(98): Xaa = X or * as defined in Table 2
KKPKTKKRTGPVRQNVRWGRSLSPGRAPAEGPQGGSTESPPLLVGRCLILGLREPGVPPAAYGRFLRDYMNSIQGKLEKQRPQXGLPSLTGAAELIKH

SEQ ID NO: 14968 - protein, 216 aa, Homo sapiens
  DOMAIN (138)..(152): Thyroglobulin type-1 repeat proteins proteins domain identified by eMATRIX, accession number BL00484B, p-value=6.344e- 14, raw score of 9.04
  DOMAIN (122)..(180): Thyroglobulin type-1 repeat domain identified by PFam, accession name thyroglobulin_1, E-value=2.7e-24, PFam score of 94.2
  misc_feature (1)...(216): Xaa = X or * as defined in Table 2
GDQRDLISNNEQLPMLGERPGAPESQRPAQPSRDTRPPLPSPKIASPMCSLKKGXKAITPMPLLPQSPKTPKPVSKMRMATPLLMQALPMDALPQGPMQNATKYGNMTEDHVMHLLTVLTKCQEEVSHIPAVHPGSFRPKCDENGNYLPLQCYGSTGYCWCVFPNGTEVPNTKSRGHHNCSAPSPSPISHLYLIPXDPGAWLFRHPGQDKPSRNSR

SEQ ID NO: 14969 - protein, 340 aa, Homo sapiens
MHRRRSRSCREDQKPVMDDQRDLISNNEQLPMLGRRPGAPESKCSRGALYTGFSILVTLLLAGQATTAYFLYQQQGRLDKLTVTSQNLQLENLRMKLPQASKPVSKMRMATPLLMQALPMGALPQGPMQNATKYGNMTEDHVMHLLQNADPLKVYPPLKGSFPENLRHLKNTMETIDWKVFESWMHHWLLFEMSQPLPCSKSPLDAPPKVLTKCQEEVSHIPAVHPGSFRGPKCGRGTGNYLAIPVAYWGASATCWCCLFPNGTREVPNTRSRGHHNCSESLGTWKDPSFLGLGVLTKQDLGPVPIVRASRGGLQHPASPTQLQLSCSLQPPAPPPSPTL

SEQ ID NO: 14970 - protein, 88 aa, Homo sapiens
  DOMAIN (30)..(45): WILM'S TUMOUR PROTEIN SIGNATURE domain identified by eMATRIX, accession number PR00049D, p-value=1.153e-09, raw score of 0.00
LSGSPLVTATSQVPGLSRGKTGGPDPALSALPAPPTSPISPPPPSRSSLRRPRAPSGCPWGCPGSLQQAPGPLHWQDYRPGVRVRLPG

SEQ ID NO: 14971 - protein, 154 aa, Homo sapiens
  misc_feature (1)...(154): Xaa = X or * as defined in Table 2
DEEDGENAHPYRNSDPVIGTHTEKVSLKASDSMDSLYSGQSSSSGITSCSDGTSNRDSFRLDDDGPYSGPYCDQATLHTDFTPSPYDTDSLKIXKGDIIDIICKTPMRMWTGMVNNKVGNFQFIYVDVISDEEAAPMTIKANRRSISILSKTLQ

SEQ ID NO: 14972 - protein, 705 aa, Homo sapiens
  DOMAIN (522)..(586): SAM domain (Sterile alpha motif) domain identified by PFam, accession name SAM, E-value=0.034, PFam score of 11.2
LSLFLDLNENDFLSNNIHTYQGKTLQGTSYQAIKSGSDPVESMGTLKRLQKLVWTKKARVQNLDEVKPTLINLQDEDDTLISCLKLTKSREKKVNSVSTRRKEEMEIRLDTLSASLGRSSTLNNCNLEDKLAWYEGEAYMWHHWKPFPENPLWTCLDFQIAQVGPWDHCSSCIRHTRLKSSCSDMDLLHSWVTLCRQESSNITCWTKLREKRGDLFCILFVCFIDRKTPRKFSDQQALEILKIGRKQKVHSLGVVRIQNAQEKAIQCFREGETSKTKEYESVIKFYPKQRSSSFGNFDRFRNNSLSKPDDSTEAHEGDPTNGSGEQSKTSNKEAVWGKKMRAISWTMRKKWGKKYIKALSEEKDEEDGENAHPYRNSDPVIGTHTEKVSLKASDSMDSLYSGQSSSSGITSCSDGTSNRDSFRLDDDGPYSGPFCGRARVHTDFTPSPYDTDSLKIKVIGEQGCLVTWKGDIIDIICKTPMGMWTGMLNNKVGNFKFIYVDVISEEEAAPKKIKANRRSNSKKSKTLQEFLERIHLQEYTSTLLLNGYETLEDLKDIKESHLIELNIENPDDRRRLLSAAENFLEEEIIQEQENEPEPLSLSSDISLNKSQLDDCPRDSGCYISSGNSDNGKEDLESENLSDMLLTDPLQLSPQLPQRGAGNINRRKTGFSLGHGKLNKEQRKDKKRLIQGWEVAEELGPSAAFG

SEQ ID NO: 14973 - protein, 149 aa, Homo sapiens; identical to SEQ ID NO: 8286
  DOMAIN (33)..(55): Globins profile domain identified by eMATRIX, accession number BL01033A, p-value=3.250e-20, raw score of 16.94
  DOMAIN (9)..(149): Globin domain identified by PFam, accession name globin, E- value=4.6e-57, PFam score of 203.0

SEQ ID NO: 14974 - protein, 155 aa, Homo sapiens
  DOMAIN (42)..(64): Globins profile domain identified by eMATRIX, accession number BL01033A, p-value=1.000e-17, raw score of 16.94
  DOMAIN (60)..(128): Globin domain identified by PFam, accession name globin, E- value=1.5e-06, PFam score of 27.3
  misc_feature (1)...(155): Xaa = X or * as defined in Table 2
PDSSGPHRLRENPPMVAVSCPTKTNVKGPPGGKVGAHAAQYGSEALGRIFLSFPTTKTYFPHFDLSHGSAQVXGATGKKVADALTNAVAHVDDMPNVAVRPXSDLHAHKLRVDPVNFKLLSHCLLGXPWPAHLPRPSFTPCGGTPSLEQSSWASC

SEQ ID NO: 14975 - protein, 145 aa, Homo sapiens
  DOMAIN (44)..(71): GENE 66 (IR5) PROTEIN SIGNATURE domain identified by eMATRIX, accession number PR00957B, p-value=8.778e-11, raw score of 10.84
  misc_feature (1)...(145): Xaa = X or * as defined in Table 2
WESCGPHQRTGXAGSSRCGWRRRAAGPGCHQPRAGVPGRTCRAGRSPAADAAGRCWLGGPPPPGCGPRCLRXCAGHPPAGSARVWSVVAGASTGLGRLWGRRWSPSCHRCQSPGCQAGRRGTARLSWPLSRRTSCRIPAARVYPR

SEQ ID NO: 14976 - protein, 139 aa, Homo sapiens
LLDPSDGKSCGPTSKDCRRRIRQYSVEALPRPALPHTTRGSGRKEARGEGQSGAGAPADPDKLEAAVAVGEDVQQAPGCHQPRAGVPGRTCRAGRSPATRGTRDGTAQGRAGPATVPIPPGPWGGPTCRRCRTLLARRS

SEQ ID NO: 14977 - protein, 74 aa, Homo sapiens
AGVFCDAGLTFTSSSGQQTAQRAELLCPQPAALRRRSEPFSVHLLDISGEYLLGTFYYCVENLRDGPCVVADAV

SEQ ID NO: 14978 - protein, 61 aa, Homo sapiens
  misc_feature (1)...(61): Xaa = X or * as defined in Table 2
WAVYCTSFMLSXCYKIXCKPALSLLGIXTTEVKTYVYTNRCCEMSTSALLIVAKNXKHSKC

SEQ ID NO: 14979 - protein, 128 aa, Homo sapiens
SEFCDWVADLDVQKYEQPSHEALTSMGSTEARVDYMGSSILMGIFSNADLKLQDEWKVNLYNTLDSSITDKSEIFVHGDLKWDIFQVMISRSTTPDLIKIGMKLQEFFTQQFDTSTRALSTWGPVPYL

SEQ ID NO: 14980 - protein, 61 aa, Homo sapiens
FFFFFERCPTLAQARVLWCLHSSPQPQSPWVSSNPASASQAAGTAGMCHRAWLLKTEVGLD

SEQ ID NO: 14981 - protein, 67 aa, Homo sapiens
FVKSKALAFFLSFFFFFFLKQSLSVTQAGVQWPVDSLQPLPPRFKRFSCLSLPSSWDYRCVPQCPAN

SEQ ID NO: 14982 - protein, 85 aa, Homo sapiens
SENQEQEEVITVRVYDPRVQNEGSWNSYVDYKIFLHTNSKAFTAKTSCVRRRYREFVWLRKQLQRYAGLVPVSELPGMPTLYGLY

SEQ ID NO: 14983 - protein, 86 aa, Homo sapiens
CCHPRLACSGMILAYCQSRLPGSKRFPCLSLPSSWDYKQPCHHTRIILVFLVETGFHHVGQTGLEMLRNSGDPPTLASQKCWDYKA

SEQ ID NO: 14984 - protein, 124 aa, Homo sapiens
  DOMAIN (6)..(55): Eukaryotic RNA polymerase II heptapeptide repeat proteins domain identified by eMATRIX, accession number BL00115Z, p-value= 8.344e-11, raw score of 3.12
RAALTPSTYKGAPSPKGAPHSTGVTSASPKEAPTPPAVTPPSPEKGPATPAPKGTPTSPPVTPSSLKDSPTSPASVTCKMGATVPQASKGLPAKKGPTALKEVLVAPAPESTPIITAPTRKGPQ

SEQ ID NO: 14985 - protein, 142 aa, Homo sapiens
  DOMAIN (35)..(84): Eukaryotic RNA polymerase II heptapeptide repeat proteins domain identified by eMATRIX, accession number BL00115Z, p-value= 8.047e-10, raw score of 3.12
IFPPPKRGFFSKKKGVVFNPPASSSRFFARPPPGVGPPPQVSSSSSSPFYFYASSSSYSSSSNFPSHSSSSSSSSSSSPRQQHPHLYPHCRLGWAERAWPPGTPLYHYKTQRKQGTSASPGRGTTCHTPQSPPLPGHHRCPW

SEQ ID NO: 14986 - protein, 83 aa, Homo sapiens
TFIRTVGWAGQTRLAPGTPLYHYKTQRKQGTSASPGRGTLSRREVTVIKTLLGRTLQPPLGATKPAPPRSKRFMGDTASLDDW

SEQ ID NO: 14987 - protein, 340 aa, Homo sapiens
  misc_feature (1)...(340): Xaa = X or * as defined in Table 2
AGLGKARLAPGTPLYHYKTQRKQGTSASPGRGTTVTQRGHCYQNAPGRTLQPPPCGQQTSGHXGPGWPYESQRLWKTPQRSXQXFLHPPPRHCHTPACGAASASPCVGRYCPRCSCAPARSASLAALTRETAPLLPSPSWAPGDPTLEGWPGNGSPLPPRGMXPHLYPHCRLGWAKRAWPRGHHCITIKPRGNKEQVQVRGEGPLSRKEVTVIKTLLVVHFSHHLAASKPAAIEGLDGLMSLRGYGKLHKDLDNDFCILLLALPHSCLRSSFCITMCRALLPEMLMCSCSLSISGRSDSGNSSSSSFSFLGSRRPHVGGLAREWFTTPTEGDVTGIEDGL

SEQ ID NO: 14988 - protein, 303 aa, Homo sapiens
  DOMAIN (279)..(289): TYPE I ANTIFREEZE PROTEIN SIGNATURE domain identified by eMATRIX, accession number PR00308C, p-value=8.062e-10, raw score of 3.83
  DOMAIN (88)..(256): RNA recognition motif. domain identified by PFam, accession name rrm, E-value=3.4e-48, PFam score of 173.6
  misc_feature (1)...(303): Xaa = X or * as defined in Table 2
MENGQSTAAKLGLPPLTPEQQEALQKAKKYAMEQSIKSVLVKQTIAHQQQQLTNLQMAAVTMGFGDPLSPLQSMAAQRQGALAIMCRVYVGSIYYELGEDTIRQAFAPFGPIKSIDMSWDSVTMKHKGFAFVEYEVPEAAQLALEQMNSVMLGGRNIKVGRPSNIGQAQPIIDQLAEEARAFNRIYVASVHQDLSDDDIKSVFEAFGKIKSCTLARDPTTGKHKGYGFIEYEKAQSSQDAVSSMNLFDLGGQYLRVGKAVTPPMPLLTPATPGGLPPAAAVAAAAATAKITAQEAVAGAAVLX

SEQ ID NO: 14989 - protein, 97 aa, Homo sapiens
  misc_feature (1)...(97): Xaa = X or * as defined in Table 2
VQGKPWGMGRAVCPAPGPVRLEERPVCGTPCLCLHPARMTPAWGSIHCLPSHGGCPCLPVNAPSWLGQPSPWARALLQXWVVLGAEGLHPTLRTTVG

SEQ ID NO: 14990 - protein, 135 aa, Homo sapiens
  DOMAIN (54)..(84): ATP:guanido phosphotransferases proteins domain identified by eMATRIX, accession number BL00112E, p-value=7.088e-30, raw score of 17.75
  DOMAIN (1)..(135): ATP:guanido phosphotransferase domain identified by PFam, accession name ATP-gua_Ptrans, E-value=7.1e-88, PFam score of 305.3
KSMTEAEQQQLIDDHFLFDKPVSPLLLASGMARDWPDARGIWIETLFKSKDYEFMWNPHLGYILTCPSNLGTGLRAGVHIKHEKFSEVLKRLRLQKRGTGGVDTAAVGGVFDVSNADRLGFSEVELVQMVVDGVN

SEQ ID NO: 14991 - protein, 56 aa, Homo sapiens
  DOMAIN (1)..(54): ATP:guanido phosphotransferase domain identified by PFam, accession name ATP-gua_Ptrans, E-value=2e-29, PFam score of 107.4
KFSEVLKRLRLQKRGTGGVDTAAVGGVFDVSNADRLGFSEVELVQMVVDGVPTMHP

SEQ ID NO: 14992 - protein, 136 aa, Homo sapiens
  DOMAIN (73)..(127): ATP:guanido phosphotransferases proteins domain identified by eMATRIX, accession number BL00112C, p-value=1.000e-40, raw score of 21.77
  DOMAIN (1)..(136): ATP:guanido phosphotransferase domain identified by PFam, accession name ATP-gua_Ptrans, E-value=4.4e-96, PFam score of 332.6
SYEVFKELFDPIISDRHGGYKPTDKHKTDLNPNLKGGDDLDPNYVLSSRVRTGRSIKGYTLPPHCSRGERRAVEKLSVEALNSLTGEFKGKYYPLKSMTEKEQQQLIDDHFLFDKPVSPLLLASGMARDWPDARGI

SEQ ID NO: 14993 - protein, 409 aa, Homo sapiens
  DOMAIN (172)..(226): ATP:guanido phosphotransferases proteins domain identified by eMATRIX, accession number BL00112C, p-value=1.000e-40, raw score of 21.77
  DOMAIN (19)..(409): ATP:guanido phosphotransferase domain identified by PFam, accession name ATP-gua_Ptrans, E-value=6e-177, PFam score of 601.2
LPTDGAPPPPPGRPPAAAMPFSNSHNALKLRFPAEDEFPDLSAHNNHMAKVLTPELYAELRAKSTPSGFTLDDVIQTGVDNPGHPYIMTVGCVAGDEESYEVFKDLFDPIIEDRDGGYKPSDEHKTDLDPDNLQGGDDLDPNYVLSSRVRTGRSIRGFCLPPHCSRGEGRAIEKLAVEALSSLDGDLAGRYYALKSMTEAEQQQLIDDHFLFDKPVSPLLLGLGHGRRNWPDARGIWHNDNKTFLVWVNEEDHLRVISMQKGGNMKEVFTRFCTGLTQIETLFKSKDYEFMWNPFHWATSLPCHCNLGTGLRAGLHIKLPNLGQGMRKFSEVLKPAAELSKSRRPPGGVEHGLRWAGVFDVFQTLNRPGPSQSVELVQMVVDGVKLLIEMEQRLEQGQAIDDLHAWPKK

SEQ ID NO: 14994 - protein, 58 aa, Homo sapiens
EQLPYFVTFISMPATTEGRRGFSLSVESACSNYATTVQVKVVNRMHISPRALGTLHHN

SEQ ID NO: 14995 - protein, 27 aa, Homo sapiens
SVTLFSMPATMKGRRGFSVSVESACSN

SEQ ID NO: 14996 - protein, 656 aa, Homo sapiens
  DOMAIN (459)..(490): Protein kinases ATP-binding region proteins domain identified by eMATRIX, accession number BL00107A, p-value=4.938e-21, raw score of 18.39
  DOMAIN (349)..(557): Eukaryotic protein kinase domain identified by PFam, accession name pkinase, E-value=3.8e-60, PFam score of 213.2
GELLCPPPPPPHFRAPGTMSALAGEDVWRCPGCGDHIAPSQIWYRTVNETWHGSCFRCSECQDSLTNWYYEKDGKLYCPKDYWGKFGEFCHGCSLLMTGPFMVAGEFKYHPECFACMSCKVIIEDGDAYALVQHATLYCGKCHNEVVLAPMFERLSTESVQEQLPYSVTLISMPATTEGRRGFSVSVESACSNYATTVQVKEVNRMHISPNNRNAIHPGDRILEINGTPVRTLRVEEVEDAISQTSQTLQLLIEHDPVSQRLDQLRLEARLAPHMQNAGHPHALSTLDTKENLEGTLRRRSLRRSNSISKSPGPSSPKEPLLFSRDISRSESLRCSSSYSQQIFRPCDLIHGEVLGKGFFGQAIKVTHKATGKVMVMKELIRCDEETQKTFLTEVKVMRSLDHPNVLKFIGVLYKDKKLNLLTEYIEGGTLKDFLRSMDPFPWQQKVRFAKGIASGMAYLHSMCIIHRDLNSHNCLIKLDKTVVVADFGLSRLIVEERKRAPMEKATTKKRTLRKNDRKKRYTVVGNPYWMAPEMLNGKSYDETVDIFSFGIVLCEIIGQVYADPDCLPRTLDFGLNVKLFWEKFVPTDCPPAFFPLAAICCRLEPESRPAFSKLEDSFEALSLYLGELGIPLPAELEELDHTVSMQYGLTRDSPP

SEQ ID NO: 14997 - protein, 173 aa, Homo sapiens
NKRIYNCMMISSRRVISLSPIVLLQIFDCPRLKFSEIPQRLTALLLPPDPIVINHVISEVAPACFSDQGMISFLPSLPLPLLPLPSLLPPCWICPSPGALGPVWGHRGHEGLDFPGSVDPSDQKKTACYDIDVEVEEPLKGQMSSFLLSTANQQEISALDSKVGPKPRAGVGH

SEQ ID NO: 14998 - protein, 475 aa, Homo sapiens
  DOMAIN (257)..(340): BAF60b domain of the SWIB complex domain identified by PFam, accession name SWIB, E-value=8.2e-10, PFam score of 46.0
  misc_feature (1)...(475): Xaa = X or * as defined in Table 2
LSRCRTLPSMTPGLQHPPTVVQRPGMPSGARMPHQGRPWAPRAPRTWAAPPCDPAWPPRDGARPQASSAPARQSQAQSQGQPEPTAPARSRSAKRRKMADKILPQRIRELVPESQAYMDLLAFERKLDQTIMRKGVDIQEALKRPMKQKRKLRLYISNTFNPAKSDAEDSDGSIASWELRVEGKLLDDPSKQKRKFSSFFKSLVIELDKDLYGPDNHLVEWHRTPTTQETDGFQVKRPGDLSVRCTLLLMLDYQPPQFKLDPRLARLLGLHTQSRSAIVQALWQYVKTNRLQDSHDKEYTMGDKYFPQNFDCPRLKFTXIPQRVTAVLMPPDPIVINHVISVDPSDQKKTACYDIDVEVEEPIKGGQMSSFLLSTANNQQEISALDSKIHETIESINQLKIQRDFMLSFLRRPHKLCARTWLRSQEPGTSRXLTDVAGNPEEERRAEFYHQPWSQEAVSRYFYCKIQASAGKEAW

SEQ ID NO: 14999 - protein, 178 aa, Homo sapiens
  misc_feature (1)...(178): Xaa = X or * as defined in Table 2
ISHMELQFGAIFAEILFRGPFHHLHNINFTWASCCPHASQPGRQRGSSWNEYHSFREFNQEKEKIWRAGSESAPLPLAGAAACPWRGGASNPICVTGASAAGGRAGGGSGEETGSAPGAACSSTXESYEAFSGFSSSPGNSVXTFSTSSTYTASPPTSPSPSVSPSPPCYYYSSSSSL

SEQ ID NO: 15000 - protein, 56 aa, Homo sapiens
HPICPQTTKAFLPRMLELQNGHIVCLNSVLALSAIPGAIDYCTSEAADFGFMESLT

SEQ ID NO: 15001 - protein, 326 aa, Homo sapiens
  DOMAIN (58)..(76): GLUCOSE/RIBITOL DEHYDROGENASE FAMILY SIGNATURE domain identified by eMATRIX, accession number PR00081A, p-value=5.750e- 12, raw score of 10.53
  DOMAIN (57)..(251): short chain dehydrogenase domain identified by PFam, accession name adh_short, E-value=3.8e-05, PFam score of -6.7
  misc_feature (1)...(326): Xaa = X or * as defined in Table 2
RIARPGEFRPLPGSAARRMAWKRLGALVMFPLQMIYLVVKAAVGLVLPAKLRDLSRENVLITGGGRGIGRQLAREFAERGARKIVLWGRTEKCLKETTEEIRQMGTECHYFICDVGNRDEVYQTAKAAREKVGDITILVKNAAVVHMGKSLMDSDDDAFLKAQNINTLGQFWNHQGPFSGKLCWKQQNGPHLVCLQLPLLGIVLAILPGAIDYCTSKASAFAFMESLDPGVLAGTCPGVSATTVLALSTTSTEMFQGHXEFRFPNLFPPLKPETVARKTQVEAVQLNQALLLLPWTMHALVILKSILPQAALEEIHKILKETYNLE

SEQ ID NO: 15002 - protein, 125 aa, Homo sapiens
KQAASNQLDSLMGLGDSHPVEERGIILCEFCGVQLFYDVLVHYQDQWDLRPGTAFFRVTEGIPRLHSQAQETWPELPLRRVRRQENLSSGYLDDTLLETANGPTFCLPARPFNNMTATYNQLSRS

SEQ ID NO: 15003 - protein, 917 aa, Homo sapiens
  DOMAIN (471)..(488): Zinc finger C2H2 type, domain proteins. domain identified by eMATRIX, accession number BL00028, p-value=3.250e-15, raw score of 16.07
  DOMAIN (161)..(914): Zinc finger, C2H2 type domain identified by PFam, accession name zf-C2H2, E-value=5.6e-200, PFam score of 677.7
MKEFSSTAQGNTEVIHTGTLQRHERHHIGDFCFQEMEKDIHDFEFQWKEDERNSHEAPMTEIKQLTGSTNRHDQRHAGNKPIKDQLGSSFHSHLPELHMFQTEGKIGNQVEKSINSASLVSTSQRISCRPKTHISKNYGNNFLNSSLLTQKQEVHMREKSFQCNESGKAFNYSSVLRKHQIIHLGAKQYKCDVCGKVFNQKRYLACHRRCHTGKKPYKCNDCGKTFSQELTLTCHHRLHTGEKHYKCSECGKTFSRNSALVIHKAIHTGEKSYKCNECGKTFSQTSYLVYHRRLHTGEKPYKCEECDKAFSFKSNLERHRKIHTGEKPYKCNECSRTFSRKSSLTRHRRLHTGEKPYKCNDCGKTFSQMSSLVYHRRLHTGEKPYKCEECDEAFSFKSNLERHRRIHTGEKPYKCNDCGKAFTSHSHLIRHQRIHTGQKSYKCEECDEAFSFKSNLERHRIIHTGEKLYKCNECGKTFSRKSSLTRHCRLHTGEKPYQCNECGKAFRGQSALIYHQAIHGIGKLYKCNDCHQVFSNATTIANHWRIHNEERSYKCNRCGKFFRHRSYLAVHWRTHSGEKPYKCEECDEAFSFKSNLQRHRRIHTGEKPYRCNECGKTFSRKSYLTCHRRLHTGEKPYKCNECGKTFGRNSALIIHKAIHTGEKPYKCNECGKAFSQKSSLTCHLRLHTGEKPYKCEECDKVFSRKSSLEKHRRIHTWREKPYKCKVCDKAFGRDSHLGTHTRIHTGEKPYKCNECGKNFRHNSALVIHKAIHSGEKPYKCNECGKTFRHNSALEIHKAIHTGEKPYKCSECGKVFNRKANLSRHHRLHTGEKPYKCNKCGKVFNQQAHLACHHRIHTGEKPYKCNECGKTFRHNSVLVIHKTIHTGEKPYKCNECGKVFNRKAKLARHHRIHTGKKH

SEQ ID NO: 15004 - protein, 49 aa, Homo sapiens
DSFGASRFLRIHAETYFTLRAYFAESRCIEALDELASLQVTMHQAQKHT

SEQ ID NO: 15005 - protein, 83 aa, Homo sapiens
KGARFLLLILYLLDAFLFNLDLFFLEYPSYFLLCFCSLLLFFFCHCFSLYFFVCRPSSSLFSSSILLILLFFLVRFLLFCLFL

SEQ ID NO: 15006 - protein, 138 aa, Homo sapiens
ATRHSMLSCIIYTYIYIKHTHTHVFIYIYTYTYIHTHIYTYTYICIHTHIHIYIYIYIHTHFFFFFFFFETESRSVTQAGVQWHDLGSLQAASWGHADSPASTSQAAGTTGAHHHAQLIFFFFVFLVETGPHRASQDS

SEQ ID NO: 15007 - protein, 68 aa, Homo sapiens
RSVFRERGKLSAGSLVERLYRVRRFDRFERILKMARKAVETHVLRSPHLVSDYRDSIIPSESLLALPC

SEQ ID NO: 15008 - protein, 63 aa, Homo sapiens
  misc_feature (1)...(63): Xaa = X or * as defined in Table 2
MFFTNIKMIAYXXXXXXXXXXXXXXXXXXXXXXXXXXXXXXXXXXXXXXXXXXXXILFSAWLR

SEQ ID NO: 15009 - protein, 82 aa, Homo sapiens
IFQLLLMEGPANIIGNTGSSNTGRSNTGPSNQSSYLISFLFLFCFFETESRSGRPGLGVQWAWISGSLQALPPGSTPFSCLS

SEQ ID NO: 15010 - protein, 164 aa, Homo sapiens
  misc_feature (1)...(164): Xaa = X or * as defined in Table 2
KGPVSKEPRSGMNRNSALRVNVRPLRPCPQEGGLPLQSCVPPLGLCRVPSRGKQPKHLLPTGXXAIAGLPNLHVIDFIPLKLSFGLXGVPQGPPPLGRGPQSQGSLVTQAPMGGGPRKGLPIDRPCEXGACTLGPWAAPVPLSSKGPFPPTVGPRSLSDSFSAR

SEQ ID NO: 15011 - protein, 157 aa, Homo sapiens
ATRELVTSSGLRRKTGLWARPREKPTAWHLASLSRPDELVRNPQEPQPGPREEGSLGHVARTPAPGGGGQRHLSRAGHSRPGRRFKATLWLSEEHPLSLGDQVTPIIDLMAISNAHFAKLRDFITLRLPPGFPVKIEIPLFHVLNARIHLSGNLCGC

SEQ ID NO: 15012 - protein, 357 aa, Homo sapiens
  DOMAIN (185)..(235): Sugar transport proteins domain identified by eMATRIX, accession number BL00216B, p-value=1.000e-35, raw score of 27.64
  DOMAIN (77)..(357): Sugar (and other) transporter domain identified by PFam, accession name sugar_tr, E-value=3.9e-30, PFam score of 113.5
MTSAKTEIVLGKRDLLEEVIDILPAPVQAFLYETACQERFCAELCDALRERHDSGEILSYLQAHQVFLVPVTPALIFAITVATIGSFQFGYNTGVINAPETIIKEFINKTLTDKANAPPSEVLLTNLWSLSVAIFSVGGMIGSFSVGLFVNRFGRRNSMLIVNLLAATGGCLMGLCKIAESVEMLILGRLVIGLFCGLCTGFVPMYIGEISPTALRGAFGTLNQLGIVIGILVAQIFGLELILGSEELWPVLLGFTILPAILQSAALPCCPESPRFLLINRKKEENATRILQRLWGTQDVSQDIQEMKDESARMSQEKQVTVLELFRVSSYRQPIIISIVLQLSQQLSGINAVSVIL

SEQ ID NO: 15013 - protein, 80 aa, Homo sapiens
SCSIGSFQFGYYPGVINAPETIIKKFINKSLTAKANAPPSEVLLTNLWSLSVAIFSRRGYESASLFPSGLFVNRFGQVLT

SEQ ID NO: 15014 - protein, 129 aa, Homo sapiens
QTGRGMWCSLVLFLLILPATPRKQSEPKTTDAAAPGTADTAGPGTMDTAVPRKAETAVPGKRNTAVPGTADPASPGTADTAEPMRTTTPTVLASWPSLTQSTKAPSPRLLPAPSPGSCSATSTSCSRSP

SEQ ID NO: 15015 - protein, 66 aa, Homo sapiens
SSGHAEPGSGGPGFLSPHCYEEVCGFFPSLSSFSPSPPECSPQLVPAGARVDALDRAGRTPLHLAK

SEQ ID NO: 15016 - protein, 137 aa, Homo sapiens
  DOMAIN (77)..(90): REPEAT PROTEIN ANK NUCLEAR ANKYR domain identified by eMATRIX, accession number PD00078B, p-value=1.900e-10, raw score of 13.14
  DOMAIN (21)..(53): Ank repeat domain identified by PFam, accession name ank, E- value=0.0019, PFam score of 24.9
CLFPVQLLLDHGADPNQRDGLGNTPLHLAACTNHVPVITTLLRGGSGFFPSLSSFSPSPPECSPQLVPAGARVDALDRAGRTPLHLAESKLNILLEGHAQCLEAVRLEEKHIIHMLKEHLELLGRHYQLINAWMTLD

SEQ ID NO: 15017 - protein, 131 aa, Homo sapiens
  DOMAIN (90)..(113): SUBUNIT HYDROGEN ION TRANSPORT T domain identified by eMATRIX, accession number PD02199H, p-value=4.918e-09, raw score of 13.62
KVQSRCSSKENILRASHSAVDITKVARRPRMASFALTSMDKAFITVLEMTPVLGTEIINYRYGMARGLVQYVVSDDIVFSFLFSLLYEYFIRSFHFSLSLFIYLSLRSFFKLRESFFCFSSIFLSSTFALS

SEQ ID NO: 15018 - protein, 77 aa, Homo sapiens
LNPILYSPGRDHRVQNFHLPRLCIQKLFPKSKCFIYELPAHRKKLVQLEPLTDDELEPDFVRQVTESMSYIFSHSMI

SEQ ID NO: 15019 - protein, 130 aa, Homo sapiens
  DOMAIN (44)..(58): PROTEIN SH3 DOMAIN REPEAT PRESYNA domain identified by eMATRIX, accession number PD00289, p-value=6.586e-09, raw score of 9.97
  DOMAIN (1)..(83): PDZ domain (Also known as DHR or GLGF) domain identified by PFam, accession name PDZ, E-value=3.3e-05, PFam score of 30.7
RVGVAGPAPWWLRVSLGGRDFHTPISVTKVAERGKAEDADLRPGDIIVAINGESAEGMLHAEAQSKIRQSPSPLRLQLDRSQATSPGQTNGDSSLEVLATRFQGSVRTYTESQSSLRSSYSSPTSLSSRA

SEQ ID NO: 15020 - protein, 86 aa, Homo sapiens
WEPPWPGPVLGLPLPPLPPPSSPSSLPIPPPPRGCSLGASSAWTAWVSSPKEPVRPQEPPPGGEGSNENHRRKWHPPFSVMLKSCY

SEQ ID NO: 15021 - protein, 39 aa, Homo sapiens
MKSKHFINLISRQHKNYNLIYTFIRSRDFKTAIFLSILS

SEQ ID NO: 15022 - protein, 147 aa, Homo sapiens
PRVRVYYFRQGHEAYVEMARKNKIYSINPKKQPWHKMELREQELMKIVGIKYEVGLPTLCCLKLAFLDPDTGKLTGGSFTMKYHDMPDVIDFLVLRQQFDDAKYRRWNIGKGECSDRFRSVIDDAWWFGTIESQEPLQLEYPDSLFQ

SEQ ID NO: 15023 - protein, 89 aa, Homo sapiens
TGVQWPDLGSLQPLPPEFKQFSCLSLLRGWDCRRPLPQLADFCIFSRDGGYCYVGQAGLKLLTSNDLPASASQSAGITGVSLCTQPKSS

SEQ ID NO: 15024 - protein, 88 aa, Homo sapiens
MVAAATGSEILLWALQAEGGGSEIGDSGNWIEIAYGTSLGGVRVIVQHPETVGSGPQLLQTFTVHRSPVTKIMLWEKHLISVCADNNH

SEQ ID NO: 15025 - protein, 52 aa, Homo sapiens
RQDGQGSVPSEAAEPAQPSGASAARRTASPCPTEQHDAPQPWQCRAAGPNAG

SEQ ID NO: 15026 - protein, 1511 aa, Homo sapiens
  DOMAIN (1315)..(1348): PROLINE-RICH PROTEIN 3 domain identified by eMATRIX, accession number DM00215, p-value=7.107e-10, raw score of 19.43
  DOMAIN (40)..(1504): EGF-like domain identified by PFam, accession name EGF, E- value=9.7e-86, PFam score of 298.3
MGRPAPAVPRPARPATPPAWTAALPAGRPRGDPGFRAFLCPLICHNGGVCVKPDRCLCPPDFAGKFCQLHSSGARPPAPAIPGLTRSVYTMPLANHRDDEHGVASMVSVHVEHPQEASVVVHQVERVSGPWEEADAEAVARAEAAARAEAAAPYTVLAQSAPREDGYSDASGFGYCFRELRGGECASPLPGLRTQEVCCRGAGLAWGVHDCQLCSERLGNSERVSAPDGPCPTGFERVNGSCEDVDECATGGRCQHGECANTRGGYTCVCPDGFLLDSSRSSCISQHVISEAKGPCFRVLRDGGCSLPILRNITKQICCCSRVGKAWGRGCQLCPPFGSEGFREICPAGPGYHYSASDLRYNTRPLGQEPPRVSLSQPRTLPATSRPSAGFLPTHRLEPRPEPRPDPRPGPEFPLPSIPAWTGPEIPESGPSSGMCQRNPQVCGPGRCISRPSGYTCACDSGFRLSPQGTRCIDVDECRRVPPPCAPGRCENSPGSFRCVCGPGFRAGPRAAECLDVDECHRVPPPCDLGRCENTPGSFLCVCPAGYQAAPHGASCQDVDECTQSPGLCGRGACKNLPGSFRCVCPAGFRGSACEEDVDECAQEPPPCGPGRCDNTAGSFHCACPAGFRSRGPGAPCQDVDECARSPPPCTYGRCENTEGSFQCVCPMGFQPNAAGSECEDVDECENHLACPGQECVNSPGSFQCRACPSGHHLHRGRCTDVDECSSGAPPCGPHGHCTNTEGSFRCSCAPGYRAPSGRPGPCADVNECLEGDFCFPHGECLNTDGSFACTCAPGYRPGPRGASCLDVDECSEEDLCQSGICTNTDGSFECICPPGHRAGPDLASCLDVDECRERGPALCGSQRCENSPGSYRCVRDCDPGYHAGPEGTCDDVDECQEYGPEICGAQRCENTPGSYRCTPACDPGYQPTPGGGCQDVDECRNRSFCGAHAVCQNLPGSFQCLCDQGYEGARDGRHCVDVNECETLQGVCGAALCENVEGSFLCVCPNSPEEFDPMTGRCVPPRTSAGMFPGSQPQAPASPVLPARPPPPPLPRRPSTPRQGPVGSGRRECYFDTAAPDACDNILARNVTWQECCCTVGEGWGSGCRIQQCPGTETAEYQSLCPHGRGYLAPSGDLSLRRDVDECQLFRDQVCKSGVCVNTAPGYSCYCSNGYYYHTQRLECIDNDECADEEPACEGGRCVNTVGSYHCTCEPPLVLDGSQRRCVSNESQSLDDNLGVCWQEVGADLVCSHPRLDRQATYTECCCLYGEAWGMDCALCPAQDSDDFEALCNVLRPPAYSPPRPGGFGLPYEYGPDLGPPYQGLPYGPELYPPPALPYDPYPPPPGPFARREAPYGAPRFDMPDFEDDGGPYGESEAPAPPGPGTRWPYRSRDTRRSFPEPEEPPEGGSYAGSLAEPYEELEAEECGILDGCTNGRCVRVPEGFTCRCFDGYRLDMTRMACVDINECDEAEAASPLCVNARCLNTDGSFRCICRPGFAPTHQPHHCAPARPRA

SEQ ID NO: 15027 - protein, 360 aa, Homo sapiens
EEKNERRDRDTERKGEARTSKTSQKRETKETTGGKTKQKRKKEKTTDKKTKRKKRTSKTEENKKRKQEKEDRERDESTKRRKEGERERRGNARRRKKGGEHSKKRGERRNNSKGEGEEEERGRKTKAKTRRTRQATNTDSKNEKGRKGKGQTRARRPAETGRRRRKRKRQRKAGETTPGETGRWCASVRSVDGSPTTAFTVLECEGSRRLGSRPRRYLLNCQANGSLAMWDLTTAMDGFGQAPAGGLTEQELMEQLEHCELAPPRCASSSLNGAVSPSPSPRISLTNASTQASSNTSFVWPTVGSPKPPARLKARRRGWGEALWKAARNWCGVGQTSDGHPHQAPWPSKRSRHSPHTFQE

SEQ ID NO: 15028 - protein, 566 aa, Homo sapiens
GGRRAAALGVAIGAAGAARAAAWTGPARRASPRALHPGRVRPALRPWADRLPLYPDLRAPQRHQRGQRRSRRGGPGGTRLPRLVPSEAAEPAQPSGASAARRTAQPLSDGATRCPPTLAMHGCWAECWMRKPLPHPQVRFYLVEGQPEEPGMVRLVCGHHNWIAVAYTQFLVCYRLKEASGWQLVFSSPRLDWPIERLALHARVHGGALGEHDKMVAAATGSEILLWALQAEGGGSEIGVFHLGVPVEALFFVGNQLIATSHTGRIGVWNAVTKHWQVQEVQPITSYDAAGSFLLLGCNNGSIYYVDVQKFPLRMKDNDLLVSELYRDPAEDGVTALSVYLTPKTSDSGNWIEIAYGTSSGGVRVIVQHPETVGSGPQLFQTFTVHRSPVTKIMLSEKHLISVCADNNHVRTWSVTRFRGMISTQPGSTPLASFKILALESADGHGGCSAGNDIGPYGERDDQQVFIQKVVPSASQLFVRLSSTGQRVCSVRSVDGSPTTAFTVLECEGSRRLGSRPRRYLLTGQANGSLAMWDLTTAMDGLGRSPAGGLTEQELMEQLEHCELAP

SEQ ID NO: 15029 - protein, 186 aa, Homo sapiens
  misc_feature (1)...(186): Xaa = X or * as defined in Table 2
TLVTVGNSQGREGLAFLVSCPEGRADCASESACSSDSLDEARSSGSEGTPADTGDLSPGHGASAPSVSREARQTVPPLTVRLHTQSVSECITEDGRTVAVGDIVWGHRRXGRTCWPGASDLCSGTLXAFWPAACRAHWARWSAWCEVPRGPAVCSGRGWTXAQRLLPLSVFVPTTQRMAALAHEAV

SEQ ID NO: 15030 - protein, 202 aa, Homo sapiens
  DOMAIN (104)..(121): PWWP domain proteins domain identified by eMATRIX, accession number PF00855, p-value=1.833e-15, raw score of 13.75
  DOMAIN (99)..(171): PWWP domain identified by PFam, accession name PWWP, E-value= 6.1e-13, PFam score of 56.4
SPEILVDPRLRPRVRLAFLVSCLVGRADCASESACSSDSLDEARSSGSEGTPADTGDLSPGHGASAPSVSREARQTVPPLTVRLHTQSVSECITEDGRTVAVGDIVWGKIHGFPWWPARVLDISLWPEGGRRAVLARRKVSWIGSPTTSFLSISKLSPFSEFFKLRFNRKKKGMYRKAITEAANAARHVAPEIRELLTQFET

SEQ ID NO: 15031 - protein, 130 aa, Homo sapiens
ADAAVPTRCVTSGHSLPISGHAAESELFHRPAGIILPSRRNVLPIRGASSTRRARPLERPATPVPVAPSSRAARSRHIDPLLQSSSPTPPGPTGSAAYVAVPTPNSSSPGPAGRPAGAMLYHSWVSEITE

SEQ ID NO: 15032 - protein, 95 aa, Homo sapiens
  DOMAIN (42)..(67): ALDO-KETO REDUCTASE SIGNATURE domain identified by eMATRIX, accession number PR00069A, p-value=6.604e-15, raw score of 16.01
  DOMAIN (12)..(95): Aldo/keto reductase family domain identified by PFam, accession name aldo_ket_red, E-value=3.3e-28, PFam score of 102.8
  misc_feature (1)...(95): Xaa = X or * as defined in Table 2
QGMDSKRRGVKLNDGQFMPVLGFGTYAPSXVPRSKALEVTKLAIEPGFRRIDSGHLYTNEEQAGLAILNMIADGCVKREDIFYTSELWATFYXPE

SEQ ID NO: 15033 - protein, 130 aa, Homo sapiens
GFRNPPRDSHHPHSTRRRRAFLRRWEKDPGRGKGRAPEPAQQRDASPPTRRPLEGPPREHLRQWERLPFPKSPWKEVFAFVSANKACSALSGPVAPVETAAEPSPPSPRVRGRSGPRTKGARPRNRCCDD

SEQ ID NO: 15034 - protein, 132 aa, Homo sapiens
ARTNTGGRPYCFIRMSNLIHRTQQGYNNPRPLSTNIILSDIQTETKLRPPYQISMCELGSAKGVTSAFSADCKGAEKISSGHQRLEPATLSGIAGFILSLLWGALNLIPGFHAIQRLLQREGDDFNSFIALF

SEQ ID NO: 15035 - protein, 62 aa, Homo sapiens
  misc_feature (1)...(62): Xaa = X or * as defined in Table 2
MSTFPIHISPKLRGDDVRGRXLXWRWPLRGFCATVRWCPPGAAGWCAXPVRAESAFXRPAKS

SEQ ID NO: 15036 - protein, 141 aa, Homo sapiens
  DOMAIN (31)..(141): Cell division protein domain identified by PFam, accession name GTP_CDC, E-value=4.1e-21, PFam score of 78.2
  misc_feature (1)...(141): Xaa = X or * as defined in Table 2
SVRWNSCRAEAPQWPAPAAAPAAHSPHLSLGESGLGKLILINSLFLTDLYSPEYPGPSQRIKKPVQVYILVFLIDDKLEXYXYTQSTCCNFHYASQSWQPAINYIDSKFEDYLNAESRVNRCQMPGNRVQGCLYFIAPSGH

SEQ ID NO: 15037 - protein, 126 aa, Homo sapiens
  DOMAIN (44)..(125): Cell division protein domain identified by PFam, accession name GTP_CDC, E-value=3.2e-26, PFam score of 96.3
  misc_feature (1)...(126): Xaa = X or * as defined in Table 2
QALRANRPAPVAEGATDRTVAQKLLNGQRQLQPRPPTRLIXAWVEQSKVLIKDGGVQLLLTIVDTPRFGDAVDNSNCWQPVINYIDIKFEDYLNAESRVNRCQMPGNRVQXXLYFIAPSGHGPLHN

SEQ ID NO: 15038 - protein, 206 aa, Homo sapiens
  DOMAIN (53)..(65): ABC transporters family proteins domain identified by eMATRIX, accession number BL00211A, p-value=3.118e-10, raw score of 12.23
  DOMAIN (45)..(206): Cell division protein domain identified by PFam, accession name GTP_CDC, E-value=2.2e-85, PFam score of 297.0
GSARSAAAEERSVNSSTMVAQQKNLEGYVGFANLPNQVYRKSVKRGFEFTLMVVGESGLGKSTLINSLFLTDLYSPEYPGPSHRIKKTVQVEQCGVLIKEGGVHLLLTIVDTPGFGDAVDNSNCWQPVIDYIDSKFEDYLNAESRVTRRQMPDNRVQCCLYFIAPSGHGLKPLDIEFMKRLHEKVNIIPLIAKADTLTPEECQQFK

SEQ ID NO: 15039 - protein, 123 aa, Homo sapiens
  DOMAIN (90)..(107): Zinc finger C2H2 type, domain proteins. domain identified by eMATRIX, accession number BL00028, p-value=8.269e-11, raw score of 16.07
  DOMAIN (44)..(111): Zinc finger, C2H2 type domain identified by PFam, accession name zf-C2H2, E-value=9.2e-08, PFam score of 39.2
VLELEERALLREARLGRARSSGGMQATPATEGLARPQAPSSSAFRCPYCKGKFRTSAERERHLHILHRPWKCGLCSFGSSQEEELLHHTCQVCGQSFTQSWFLKGHMRKHKASFDHACPVCGR

SEQ ID NO: 15040 - protein, 313 aa, Homo sapiens
  DOMAIN (59)..(73): C2H2-TYPE ZINC FINGER SIGNATURE domain identified by eMATRIX, accession number PR00048A, p-value=8.826e-10, raw score of 10.52
  DOMAIN (60)..(302): Zinc finger, C2H2 type domain identified by PFam, accession name zf-C2H2, E-value=1.2e-15, PFam score of 65.4
RGSMEGSRPRAPSGHLAPSPPAFDGELDLQRYSNGPAVSAGSLGMGAVSWSESRAGERRFPCPVCGKRFRFNSILALHLRAHPGAQAFQCPHCGHRAAQRALLRSHLRTHQPERPRSPAARLLLELEERALLREAPTGESPKLRGHAGHPLPLMVWPRPQAPSSSAFRCPYCKGKFRTRLERERHLHILHRPWKCGLCSFGSSQEEELLHHSLTAHGAPERPLAATSVAPPPQPQPQPPPQPEPRSVPQPEPEPEPEREATPTPAPAAPEEPPAPPEFRCQVCGQSFTQSWFLKGHMRKHKASFDHACPVCGR

SEQ ID NO: 15041 - protein, 193 aa, Homo sapiens
GNAGLSSLTEGVLDLFAVKAVYMGHPGIDIHTVCVQNKLGSMFLSETGVTLLYGLQTTDNRLLHFVAPKHTAKMLFSGLLELTRAVRKMRKFPDQRQQWLRKQYVSLYQEDGRYEGPTLAHAVELFGGRRWSARNPSPGTSAKNAEKPNMQRNNTLGISTTKKKKKILMRGESGEVTDDEMATRKAKMHKECR

SEQ ID NO: 15042 - protein, 142 aa, Homo sapiens
SVGSESDSSKEGPSMTRSGPLRRSRAVPGPEESQGNTLVIRVVIHDLQQTKCIRFNPDATVWVAKQRILCTLTQSLKDVLNYGLFQPASNGRDGKFLDEERLLREYPQPVGEGVPSLEFRYKKRVYKQASLDEKQLAKLHTK

SEQ ID NO: 15043 - protein, 45 aa, Homo sapiens
  misc_feature (1)...(45): Xaa = X or * as defined in Table 2
WFQNPCYYYLFFLETESLSPRLERSGTVSAHCSLXLPSSSDSPAS

SEQ ID NO: 15044 - protein, 82 aa, Homo sapiens
  DOMAIN (1)..(32): Aminotransferases class-III pyridoxal-pho domain identified by PFam, accession name aminotran_3, E-value=0.00049, PFam score of 13.2
VIFLVNSGSEANELAMLMARAHSNNIDIISFRTMCPDVFRGPWGGSHCRDSPVQTIRKCSCAPGPTGQGGCQWSVGSWKGHE

SEQ ID NO: 15045 - protein, 167 aa, Homo sapiens
MTLIWRHLLRPLCLVTSAPRILEMHPFLSRKWKPGGRGSVEDQREEHAWDRGDLHREGCERSCPERMIPNSNGEGPQQRAADCGPMCEEKTTTLESPSWQLQHREAEEKNFSTDQTLSLRRPNPNTASAGLHGRQCLKRTSRTSVTKLSLHTKPRMPPCDFMPERYQ

SEQ ID NO: 15046 - protein, 107 aa, Homo sapiens
MELPGGTGCQPTMCPDVFRGPWGGSHCRDSPVQTIRKCSCAPDCCQAKDQYIEQFKDTLSTSVAKSIAGFFRRTYSRCEWSCPVPKGVFKGSLLSLVRARGRPCALQ

SEQ ID NO: 15047 - protein, 213 aa, Homo sapiens
  DOMAIN (138)..(164): Aminotransferases class-III pyridoxal-phosphate attachment si domain identified by eMATRIX, accession number BL00600B, p-value= 2.703e-14, raw score of 19.60
LSPSYFHSISFPHSLFLPLEGTVTRNRELWGLLQAMGVHHSRIPLLAPPPHLNLKVQQDSEQLEPGLQSASMGVGFLSGRNDSNLETFAETLVPGSIPLPGILEMHPFLSLGTSRTSVTKLSLHIKPRMPPCDFMPERYQVIFLVNSGSEANELAMLMARAHSNNIDIISFRGAYHGCSPYTLGLTNVGTYKMKLPGGTGCQPVSLEIFLLFL

SEQ ID NO: 15048 - protein, 61 aa, Homo sapiens
FHIVQYFNFFVCLFVCLFETESTLSPRLEGSGVISAHCNLTLPPGFNNSCASASRVAGTTQ

SEQ ID NO: 15049 - protein, 102 aa, Homo sapiens
RPRRRGDHREVKGGRGGKGGEGRPQGGQRWAVGKGGEGRPQGGQRWAVGKGGEGRPQGGQRWAEGKGGEGRPQGGQRGQWGKGGEGRPQGGERGPGGKGGEG

SEQ ID NO: 15050 - protein, 105 aa, Homo sapiens
KYVFTDISYSIPHRERFIVVREPSGTLRKASWEERDRMIQVYFPKEGRKILTPIIFKEENLRFEPDSTEYIKVHHKTYEDIGKRGKYDLLRSTRYFGWEWVWVFC

SEQ ID NO: 15051 - protein, 347 aa, Homo sapiens
GVLRAWNGSVSGLESSPGTVACSNRYLALSRWGCHSRRINSYGAESGSPETKKPTFMDEEVQRVLTKMTGLNLQKTFKPAIQELKPPTYKLMTQAQLEEATRQAVEAAKVRLKMPPVLEERVPINDVLAGDKDFWKGTETTKYVFTDISYCIPHRERFIVVREPSGTLRKASLEDRDRMIQVYFPKEGRKILPPIIFKEENLRTMYSQDRHVDVLNLCFAQFEPDSTEYIKVHHKTYEDIDKRGKYDLLRSTRYFGEMVWYFVNNKKIDGLLIDQIQRDLIDDATNLVQLYHVLHPDGQSAQGAKDQAAEGINLIKVFAKTEAQKGAYIELTLQTYQEALSRHSAAS

SEQ ID NO: 15052 - protein, 127 aa, Homo sapiens
  DOMAIN (10)..(43): PROLINE-RICH PROTEIN 3 domain identified by eMATRIX, accession number DM00215, p-value=6.797e-09, raw score of 19.43
FSAPAASEPLPFSGPPPSEPLPFSGPPPSDPLAFAAPPPSEPLTFSGPPPPSEPLTFSGPPPSDPLCFTAPPPSEPVPFSGPAPSDRLPFFGPTTSEPPNRPGMPTQPHPICLSKNTPLPEPTRLHP

SEQ ID NO: 15053 - protein, 823 aa, Homo sapiens
  DOMAIN (162)..(176): C2 DOMAIN SIGNATURE domain identified by eMATRIX, accession number PR00360B, p-value=1.818e-11, raw score of 13.61
  DOMAIN (97)..(198): C2 domain identified by PFam, accession name C2, E-value= 0.075, PFam score of 6.1
PAIKIRRRRVRDLQDPPPQMAPEIQPPSHHFSPEQRALLYEDTLYTVLHRLGHPEPNHVTEASELLRYLQEAFHVEPEEHQQTLQRVRELEKPIFCLKATVKQAKGILGKDVSGFSDPYCLLGIEQGVGVPGGSPGSRHRQKAVVRHTIPEEETHRTQVITQTLNPVWDETFILEFEDITNASFHLDMWDLDTVESVRQKLGELTDLHGLRRIFKEARKDKGQDDFLGNVVLRLQDLRCREDQWYPLEPRTESYPDRGQGHLQGQLVHKRRATSASRSQPSYTVHLHLLQQLVSHEVTQHEAGSTSWGRVAESQAATVLFLHATQKDLSDFHQSMAQWVAYSRLYQSLEFPSSCLLHPITSIEYQWIQGRLKAEQQEELAASFSSLLTYGLSLIRRFRSVFPLSVSDSPARLQSLLRVLVQMCKMKAFGELCPNTAPLPQLVTEALQTGTTEWFHLKQQHHQPMVQGIPEAGKALLGLVQDVIGDLHQCQRTWDKIFHNELISSTLKIHLFSMAFRELQWLVAKRVQDHTTVVGDVVSPEMGESLFQLYISLKELCQLRMSSSERDGVLALDNFHRWFQPAIPSWLQKTYNEALARVQRAVQMDELVPLGELTKHSTSAVDLSTGFAQISHTARQLDWPDPEEAFMITVKFVEDTCRLALVYCSLIKARARELFFRARRTKARAANMLCVVVNDMEQLRLVIGKLPAQLAWEALEQRVGAVLEQGQLQNTLHAQLSGALAGLGHEIRTGVRTLAEQLEVGIAKHIQKLVGVRESVLPEDAILPLMKFLEVELCYMNTNLVQENFSSLLTLLWTHTLTVLVEAA

SEQ ID NO: 15054 - protein, 57 aa, Homo sapiens
  misc_feature (1)...(57): Xaa = X or * as defined in Table 2
IPLALSTGNGTLLFFFXDRVSLLSPTLECSGVISAHCNLCLPGSSYSAALASQVAGI

SEQ ID NO: 15055 - protein, 160 aa, Homo sapiens
  DOMAIN (90)..(136): kw TRANSCRIPTASE REVERSE II ORF2 domain identified by eMATRIX, accession number DM01354O, p-value=6.053e-15, raw score of 8.73
GDHASDKETITIVNIYAPNIRACSKYIKQTLTELKGEVDSNVITAISILRFQQLPTLIKTESLRNRNSSSSSSSSSPSSSSSSSSLKKSLPTKESIGPDGFTDEFYQTFKEELKPKSSSSSSSSSSSSSSSSSSSSSSSSSSSSPEKDATREENYRPISL

SEQ ID NO: 15056 - protein, 61 aa, Homo sapiens
  DOMAIN (18)..(48): kw TRANSCRIPTASE REVERSE II ORF2 domain identified by eMATRIX, accession number DM01354R, p-value=4.828e-14, raw score of 8.50
TYHIDRIKDKSHMIISIATEKAFDKIEHPFMIKALSQLEVVGMTNVIKAIYKKSMANITQQ

SEQ ID NO: 15057 - protein, 135 aa, Homo sapiens
NTANRAARVSASIEDSPDNSETLPPDESFRNGENAKRFAIDIGGTLTKLAYYSTVQHKVAKGRAFDHSGKDTERDTSRPMRVQFKKRALLDGTSLRRRKPTPKPAWTSSKTISSTQRPEVIQATGGGAYKVKDLI

SEQ ID NO: 15058 - protein, 131 aa, Homo sapiens
KEELYGDFEDLETGDVHKGKSGPDTQNEDIEKQDEIDPDEKKSAKKKHLDKKRKLKEMLDAEYDEGESTYFDDLKGEMQKEAQMRLKNHRWYKKILKSQDPIIFSVGWRRVHTILLYYIEDHNGRQRLLKY

SEQ ID NO: 15059 - protein, 355 aa, Homo sapiens
  DOMAIN (136)..(151): RIBOSOMAL PROTEIN P2 SIGNATURE domain identified by eMATRIX, accession number PR00456E, p-value=6.810e-09, raw score of 3.06
  misc_feature (1)...(355): Xaa = X or * as defined in Table 2
MAANRKDFIHRRCGPELSQSEAVPQGLCRAERSSALAMLSGSVPRRTQLRPCKGTQRRCRRGGEADSGGEAVGGGAAERRSAAARRRGGRRRGGGEAVGGGAAERRSAAARRRRGGRRRRGGGEAGGGGAAEARRAAAARRAAAARRAAAARRAAAARRAAAARRIAESGGEAHSRGEAHSGGEAHSGGAGAERRRPRLHSPALKTHPGQSSEGHVEYKLNHVEFEDQDDEARVQYEGFRPGMYVRVEIENVPCEFVQNFDPLYPIILGGLGNSEGNVGHVQMRLKKHLWYKKILKSQDPFISSVGGRRFQTIPLYYIEDHNGRQRLLKYTPQHMHCGAAFWGKIXLQXLAYCRD

SEQ ID NO: 15060 - protein, 259 aa, Homo sapiens
  misc_feature (1)...(259): Xaa = X or * as defined in Table 2
KEELYGDFEDLETGDVHKGKSGPDTQNEDVEKKEEIDPDEEESAKKKHLDKKRKLKEMFDVEYDEGESTYFDDLKGEMQKQAQITAYRFSPPTPSCTLNHAEFEDQDDEARVQYEGFRPGMYVCVEIENVPCEFVXNFDPRYPIILGGLGNSEGNVGYVQVGPFAAYLVPEALWISPPSIILPSHPPQMRLKKHRWYKKILKSRDPIIFSVGWRRFQTIPLCYIEDHNGRQRLLKYTPQHVHRGAAFWDKICLQXLAYC

SEQ ID NO: 15061 - protein, 390 aa, Homo sapiens
  misc_feature (1)...(390): Xaa = X or * as defined in Table 2
LRMRLGTRSALWACRGWGQQHMHAWLTEQPLGVLFPEELYGDFEDLETGDVHKGKSGPDTQNEDIEKEVKEEIDPDEEESAKKKHLDKKRKLKEMFDAEYDEGESTYFDDLKGEMQKKAQLNHVEFEDQDDEARVQYEGFRPGMYVRIEIENVPCEFVQNFDPHYPIILGGLGNSEGNVGYVQMRLKKHRWYKKILKSRDPIIFSVGWRRFHTIPLYYIEDHNGRQRLLKYTPQHMHCGAAFWGPITPQGTGFLAIQSVSGIMPDFRVAATGVVLDLDKSIKIVKKLKLTGFPYKIFKNTSFIKGMFNSALEVAKFEGAVIRTVSGIRGQIKKALRAPEGVFRASFEDKLLMSDIVLMRLSTCSIPAFYNPVTSCXTIGEKHLVRMRPRP

SEQ ID NO: 15062 - protein, 69 aa, Homo sapiens
  DOMAIN (14)..(54): kw TRANSCRIPTASE REVERSE II ORF2 domain identified by eMATRIX, accession number DM01354Y, p-value=1.148e-25, raw score of 10.69
KGTTKLVVKLSDFKSYFKAIVIKTVRNWHKYKHIDQWNRIQNPEINPHIYGQMIFKKRAKNKQWKKDGL

SEQ ID NO: 15063 - protein, 403 aa, Homo sapiens
  DOMAIN (353)..(386): Manganese and iron superoxide dismutases proteins domain identified by eMATRIX, accession number BL00088D, p-value=6.400e- 39, raw score of 14.40
  DOMAIN (26)..(403): Iron/manganese superoxide dismutases (SODM) domain identified by PFam, accession name sodfe, E-value=1.1e-116, PFam score of 401.0
  misc_feature (1)...(403): Xaa = X or * as defined in Table 2
PGCAFSSSGTSRQLAPVLGYLGSRQKHSLPDLPYDYGALEPHINAQIMQLHHSKHHAAYVNNLNVTEEKYQEALAKGRFQAEREKNVVCTFNFXGDVTAQIALQPALKFNGGGHINHSIFWTNLSPNGGGEPKGWIYCAPLSTTSCTVGIDVISWALXQKIFXIHVIXHFTVIIGNLFICGWFWDFFFNRELLEAIKRDFGSFDKFKEKLTAASVGVQGSGWGWLGFNKQRGHLQIAACPNQDPLQGTTGYIXIGLSVVPVWKTSPLLKNVDSKVKGRKTVYQGDGHYVNHHPNQVFWGRGAVKALNRNLKGAPDLELDGESRANCGEKGREESERSGRXAWQLCSVTGAPFFLTGLIPLLGIDVWEHAYYLQYKNVRPDYLKAIWNVINWENVTERYMACKK

SEQ ID NO: 15064 - protein, 78 aa, Homo sapiens
  DOMAIN (31)..(43): Manganese and iron superoxide dismutases proteins domain identified by eMATRIX, accession number BL00088B, p-value=4.600e- 15, raw score of 10.14
  DOMAIN (15)..(56): Iron/manganese superoxide dismutases (SODM) domain identified by PFam, accession name sodfe, E-value=1.3e-15, PFam score of 59.6
KSRSYKKMCLHFNFSGDVTAQIALQPALKFNGGGHINHSIFWTNLSPNGGGEPKGWYILVHPYLHFVHSRNRLLIYWR

SEQ ID NO: 15065 - protein, 55 aa, Homo sapiens
  misc_feature (1)...(55): Xaa = X or * as defined in Table 2
MYGLPGFFYAHRXXXXXXXXXXXXXRHAPALRVTNRSHSPTGGRVALPQPWLVMV

SEQ ID NO: 15066 - protein, 37 aa, Homo sapiens
  misc_feature (1)...(37): Xaa = X or * as defined in Table 2
SPNXSPNVIFDSXDSPEKTAATVRGDFYVTGDRGMMD

SEQ ID NO: 15067 - protein, 256 aa, Homo sapiens
  DOMAIN (212)..(245): Manganese and iron superoxide dismutases proteins domain identified by eMATRIX, accession number BL00088D, p-value=6.400e- 39, raw score of 14.40
  DOMAIN (58)..(256): Iron/manganese superoxide dismutases (SODM) domain identified by PFam, accession name sodfe, E-value=4.1e-113, PFam score of 389.2
GPRAAQERHSWLWWLRQRLQQIGGISGSTSTSSMLSRAVCGTSRQLAPVLGYLGSRQKHSLPDLPYDYGALEPHINAHIMHLHHSKHHAAYVNNLNVTEEKYHEALARGDVTAQIALQPALKFNGGGHINHSIFWTNLSPNGGGEPKGEELLEAIKRDFGSFDKFKEKLTAASVGVQGSGWGWLGFNKERGHLQIAACPNQDPLQGTTGLIPLLGIDVWEHAYYLQYKNVRPDYLKAIWNVINWENVTERYMACKK

SEQ ID NO: 15068 - protein, 145 aa, Homo sapiens
  DOMAIN (96)..(140): Synapsins proteins domain identified by eMATRIX, accession number BL00415N, p-value=2.924e-10, raw score of 4.29
SGRGASLRPGVRPPSVSWEPYSGPGSTPPPPSSRSKDVGKPAQSWVRGGSTQPNTGQLPKEGLSTPHPVPRAGIPSSRQALLSSGNPGTRAPSAPALRPEAQASPAEFPGAPSPELGGERLGGARFQEPPPQPAASFPGAAATQA

SEQ ID NO: 15069 - protein, 139 aa, Homo sapiens
  DOMAIN (9)..(24): LIM domain proteins domain identified by eMATRIX, accession number BL00478B, p-value=3.200e-11, raw score of 14.79
  DOMAIN (7)..(106): LIM domain containing proteins domain identified by PFam, accession name LIM, E-value=7.3e-16, PFam score of 61.1
PGSSRQRCWHQPCFACQACGQALINLIYFYHDGQLYCGRHHAELLRPRCPACDQLIFSWRCTEAEGQRWHENHFCCQDCAGPLGGGRYALPGGSPCCPSCFENRYSDAGSSWAGALEGDAFLGEHWKVTHSLGRLDSTN

SEQ ID NO: 15070 - protein, 406 aa, Homo sapiens
  DOMAIN (150)..(164): Src homology 3 (SH3) domain proteins profile domain identified by eMATRIX, accession number BL50002B, p-value=1.000e- 10, raw score of 15.18
  DOMAIN (108)..(164): SH3 domain identified by PFam, accession name SH3, E-value= 4.5e-14, PFam score of 60.2
MGGHLANVPTGTSLQQTGLMEKHFTSGKQLLKTLQNNIPQTTERTHNGWHQAWLLVFSCVRSFYVAALFAVGLGCGIHWFCLAVFSVCAGHSTAVVSLPGSQQHLSANMFVALHSYSAHGPDELDLQKGEGVRVLGKCQDGWLRGVSLVTGRVGIFPNNYVIPIFSTPSQLSGCREVGPTLVKPVVHKMGVYGWEEGSISEGDHGKAVPSNPSVVPTAIVNPVRSTAGPGTLGQGSLRKGRSSMRKNGSLQRPLQSGIPTLVVGSLRRSPTMGPSASAVPILPATGDPLLPLSRGGGDGVQASPSRGSPPSRASAGAVRPGSTPRPAPSLWKTKKSPSRVSLLPKPPASAPPSILVKPENSRNGIEKQDQNREISEIQALLPPNITLPYPTSGKPEQPSLPQCVPA

SEQ ID NO: 15071 - protein, 61 aa, Homo sapiens; identical to SEQ ID NO: 15048

SEQ ID NO: 15072 - protein, 61 aa, Homo sapiens; identical to SEQ ID NO: 15048

SEQ ID NO: 15073 - protein, 171 aa, Homo sapiens
  DOMAIN (141)..(155): PROTEIN SH3 DOMAIN REPEAT PRESYNA domain identified by eMATRIX, accession number PD00289, p-value=7.828e-09, raw score of 9.97
  DOMAIN (94)..(171): PDZ domain (Also known as DHR or GLGF) domain identified by PFam, accession name PDZ, E-value=5.3e-11, PFam score of 50.0
LSQSEKNNYYSSRFSPDSQYIDNRSVNSDRASQARERAPRLNHPPEQIDSHSRLPHSAHPSGKPPSAPASAPQNVFSTTVSSGYNTKKIGKRLNIQLKKGTEGLGFSITSRDVTIGGSAPIYVKNILPRGAAIQDGRLKAGDRLIEVNGVDLVGKSQEEVVSLLRSTKMEG

SEQ ID NO: 15074 - protein, 150 aa, Homo sapiens
DPRVRAAGILYEFTWNQFCDWYLELTGPVMNGGTEAKLRGTRHTLVTVLEGLLRLAHPIIPFITETIWQRVKVLCGITADTIMLQPFPQYDASQVDEAALADTEWLKQAIVAVRNIRAEMNIAPGKPLELLVAGCTRNPNTSVNENRGFL

SEQ ID NO: 15075 - protein, 167 aa, Homo sapiens
EPVKKIFNYIIHVFRNIMDFKLFLVFVAGVFLFFYARTLSQSPTFYYSSGTVLGVLMTLVFVLLLVKRFIPKYSTFRALMVGCWFASVYIVCQLMEDLKWLRYDNRIYVLGYVLIVGFFSFVVCYKHGPLADDRSRSLLMWMLRLLSLVLVYAGVAVPQFAYAAIIL

SEQ ID NO: 15076 - protein, 138 aa, Homo sapiens
EPVKKIFNYMIHVNRNIMDFKLFLVFVAGVFLFFYARTLSQSPTFYYSSGTVLGVLMTLVFVLLLVKRFIPKYSTFWALMVGCWFASVYIVCQLMEDLKWLWYENRIYVLSYVLIVGFFSFVVGTSMGPLADDKSRNL

SEQ ID NO: 15077 - protein, 92 aa, Homo sapiens
  misc_feature (1)...(92): Xaa = X or * as defined in Table 2
GPFFFFFGDRVLLCHPRLECSGMITAHCSLKLLCSQXPSHNSLLNSWEHRHMPPHLAKFFFHQQTKLXKKXNKNRSLESAPLSVFIKKVTTT

SEQ ID NO: 15078 - protein, 137 aa, Homo sapiens
RPIRMAVKQKISMLCHVNPEQVICIHDVSSTYRVPVLLEEQSIVKYFKERLHLPIGDSASNLLFKWRNMADRYERLQKICSIALVGKYTKLRDCYASVFKALEHSALAINHKLNLMYIDSIDLEKITETEDPVKFHE

SEQ ID NO: 15079 - protein, 47 aa, Homo sapiens
GRYAYVWHCPQGPGLETPLVADTSGAYFRREGLGSNYLGGRSPTEVS

SEQ ID NO: 15080 - protein, 57 aa, Homo sapiens
MCHHTQPIFVFVVEMRFYYVGQAGLEVLTSGDPPVSAAQSTGITGLSHRAQPSSVRF

SEQ ID NO: 15081 - protein, 35 aa, Homo sapiens
KHGWLGTVAHTCNPSTLGGQGGWIMRSGVQDQPGQ

SEQ ID NO: 15082 - protein, 150 aa, Homo sapiens
SPVPQLIVPTVLSVVLLEPFLGAPLPANRLWTHLWAPRAWKQSPWQAPGLGRLPSSLGIGSCGAPGAYTRPDIRLHDKACPAEHGGGRGPGEAASRPLTAPSPGGCPERGLGTTPSPQSRTASSGGSYRSFTDPPPPPPICHHRRFFLTL

SEQ ID NO: 15083 - protein, 124 aa, Homo sapiens
  DOMAIN (31)..(50): Src homology 3 (SH3) domain proteins profile domain identified by eMATRIX, accession number BL50002A, p-value=1.000e- 12, raw score of 14.19
  DOMAIN (27)..(82): SH3 domain identified by PFam, accession name SH3, E-value= 2.2e-12, PFam score of 54.5
DLQSSQGGQQPRVQSWSPPGRGIPQLPCAKALYNYEGKEPGDLKFSKGDIIILRTQVDENWYHGEVNGIHGFFPTNFVQIIKPLPQPPPQCKALYDFEGKDKEADKDCLPFAKDDVLTVIRRVD

SEQ ID NO: 15084 - protein, 163 aa, Homo sapiens
  DOMAIN (104)..(136): ABC transporters family proteins domain identified by eMATRIX, accession number BL00211B, p-value=5.846e-28, raw score of 13.37
  DOMAIN (2)..(161): ABC transporter domain identified by PFam, accession name ABC_tran, E-value=1e-16, PFam score of 69.0
LTLLNTITPSLARGNFYPLEGGRVLLDGKPISAYDHKYLHRVISLVSQEPVLFARSITDNISYGLPTVPFEMVVEAAQKANAHGFIMELQDGYSTETGEKGAQLSGGQKQRVAMARALVRNPPVLILDEATNALDADSRDLIQHALSGNLRKHRDFLSPPVWP

SEQ ID NO: 15085 - protein, 238 aa, Homo sapiens
EGKVEEPENPAAKEKCEGKEEEEETDGSGKESKQECEAEASSVKNELKGVEVGANTGSKSISEKGSEEVKRKSWRMTNKSEESSQPEAGAVSRGKNFDEESNASMSTARDETRDGFYMEDGDPSVAQLLHERTFAFSFWPKDRVMINRLDNICEAVLKGKWPVNRRQMFDFQGLIPGYTPTTVDSPLQKRSFAELSMVGQASISGSEDITTSPQLSKEDALNLSVPRQRRRRRRKIGN

SEQ ID NO: 15086 - protein, 90 aa, Homo sapiens
DRGLASFAQGLEVQWHNLSSLQPSPPVLRRFSPCLGLPRGCDYRPVPPHQANFCIVSRDGFYHVGQAGLELLTSSDPPTSQSQSAGITGV

SEQ ID NO: 15087 - protein, 63 aa, Homo sapiens
  DOMAIN (14)..(48): kw TRANSCRIPTASE REVERSE II ORF2 domain identified by eMATRIX, accession number DM01354P, p-value=5.080e-23, raw score of 9.18
ENKEEGQLPSSFYEASIILTLKPDKDSTKKSSYRPTSLMNFDAKIFNKMFTNRIQQYIERIIH

SEQ ID NO: 15088 - protein, 92 aa, Homo sapiens; identical to SEQ ID NO: 15077
  misc_feature (1)...(92): Xaa = X or * as defined in Table 2

SEQ ID NO: 15089 - protein, 832 aa, Homo sapiens
  DOMAIN (560)..(586): Calponin family repeat proteins domain identified by eMATRIX, accession number BL01052B, p-value=1.434e-10, raw score of 15.31
  DOMAIN (92)..(251): Leucine Rich Repeat domain identified by PFam, accession name LRR, E-value=8.2e-16, PFam score of 66.0
MAAAVAAPLAAGGEEAAATTSVPGSPGLPGRRSAERALEDAVATGTLNLSNRRLKHFPRGAARSYDLSDITQADLSRNRFPEVPEAACQLVSLEGLSLYHNCLRCLNPALGNLTALTYLNLSRNQLSLLPPYICQLPLRVLIVSNNKLGALPPDIGTLGSLRQLDVSSNELQSLPSELCGLSSLRDLNVRRNQLSTLPEELGDLPLVRLDFSCNRVSRIPVSFCRLRHLQVILLDSNPLQSPPAQVCLKGKLHIFKYLSTEAGQRGSALGDLAPSRPPSFSPCPAEDLFPGHRYDGGLDSGFHSVDSGSKRWSGNESTDEFSELSFRISELAREPRGPRERKEDGSADGDPVQIDFIDSHVPGEDEERGTVEEQRPPELSPGAGDRERAPNSRREEPAGEERRRPDTLQLWQERERRQQQQSGAWGAPRKDSLLKPGLRAVVGGAAAVSTQAMHNGSPKSSASQAGGCSGAGSPAPAPASQEPLPIAGPATEPAPRPLGSIQRPNSFLFRSSSQSGSGPSSPDSVLRPRRYPQVPDEKDLMTQLRQVLESRLQRPLPEDLAEALASGVILCQLANQLRPRSVPFIHVPSPAVPKLSALKARKNVESFLEACRKMGVPEADLCSPSDLLQGTARGLRTALEAVKRVGGKALPPLWPPSGLGGFVVFYVVLMLLLYVTYTRLLDPRSPQVAWEVAPSRMTPLAPWDPKYEAKAGPRPVWVSWGQTCGTGWGAQGAVRWPEAPVLCPPHPRGPTVAQEPRSQAGRCVTPHSGRCMKQPRAGVSGPWPLPQGTGMDSRRPQMQGSRWCAVKMSSSRTLCCPGGSVFPCTCPRPPSR

SEQ ID NO: 15090 - protein, 214 aa, Homo sapiens
  DOMAIN (34)..(60): Calponin family repeat proteins domain identified by eMATRIX, accession number BL01052B, p-value=1.434e-10, raw score of 15.31
RPPPVPQVPDKKDLMTQLRRVLESRLQRPLPEDLAEALASGVILCQLANQLRPRSVPFIHVPSPAVPKLSALKARKNVESFLEACRKMGVPEESLCQPHHILEEEGAPGRGLRLIIAAVVQRPAGPALGVKVGAQGPPRPGPREQKTRLGSALSEKHVVRVAWAWARLGLPRLAASGVEGLGGRTCGCRRCRVSRNKQKPEALWKRGCKIKKKL

SEQ ID NO: 15091 - protein, 149 aa, Homo sapiens
  DOMAIN (35)..(50): WILM'S TUMOUR PROTEIN SIGNATURE domain identified by eMATRIX, accession number PR00049D, p-value=6.238e-13, raw score of 0.00
SRSLVQRGGIPLGGWRMGVRRTGQVGPTMHPPPVSGASPPPPPPPPPPPPHHHPHLLRTSCVPSGLYAQSSSSSSSSSSSSSSSSSSSSSSSSSSSQLNKLPKFQVSSPNSPTLSSSFSFLPFFPASSLTRQFFIECLPGAGMSQVLGK

SEQ ID NO: 15092 - protein, 121 aa, Homo sapiens
LLGQAVKYGVNPGPYGGTTRKLYEKKLLRLREQGPESRCSTPVPTISSSAENARQNGSNDSGRYSVNEEDSKIELKLEKRDPLKGRAKTPVTRKQRRVELSESYSQAGMDEGVWSSGSSKG

SEQ ID NO: 15093 - protein, 496 aa, Homo sapiens
ALMDEILMLQDEINELQSSLAEELVSESCEADPAEQLALQSTLTVLAERMSTIRMKASGKRQLLEEKLNDQLEEQRQEQALQRYRCEADELDSWLLSTKATLDTALSPPKEPMDMEAQLMDCQNMLVEIEQKVVALSELSVHNENLLLEGKAHTKDEAEQLAGKLRRLKGSLLELQRALHDKQLNMQQGTAQEKEESDVDLTATQSPGVQEWLAQARTTWTQQRQSSLQQQKELEQELAEQKSLLRSVASRGEEILIQHSAAETSGDAGEKPDVLSQELGMEEEETSAEDQMRMKWESLHQEFSTKQKLLQNVLEQEQEQVLYSRPNRLLSGVPLYKGDVPTQDKSAVTSLLDGLNQAFEEVSSQSGGAKRQSIHLEQKLYDGVSATSTWLDDVEERLFVATALLPEETETCLFNQEILAKDIKEMSEEMDKNKNLFSQAFPENGDNRDVIEDTLGCLLGRLSLLDSVVNQRCHQMKERLQQILNFQVSKILSKDT

SEQ ID NO: 15094 - protein, 88 aa, Homo sapiens
  DOMAIN (2)..(30): !!!! PROTEIN ALU SUBFAMILY WARNING ENTRY NUCLEAR PHOSPHO domain identified by eMATRIX, accession number PD02454B, p-value= 1.614e-11, raw score of 11.61
  misc_feature (1)...(88): Xaa = X or * as defined in Table 2
SLRSSKTQPRQHGKTSSLLKIQKISRVWXRTLLLGKLRQENCLNPGGGGCSEPRLHHCTPAWATEXDSGSQKKKKGQGRKSCHFSVRT

SEQ ID NO: 15095 - protein, 52 aa, Homo sapiens
PYSGLGIFFFFLRHGLTLSPRLGCSELRLCHCTPAWVTSKTVSKNKKQKNSR

SEQ ID NO: 15096 - protein, 138 aa, Homo sapiens
STHASGDHSKPIICSTGSYFFANSLPSKGPTTLMPVNTAALTVPANPASVITVPSKLPTSSKPPGAVPSNALTNPAPSKLPINSTRAGMVPSKVPTSMVLTKGCASTVPTDGSSINEETPMAPTPAGAVGSSLAWLDT

SEQ ID NO: 15097 - protein, 138 aa, Homo sapiens
  DOMAIN (60)..(115): Sodium:solute symporter family proteins domain identified by eMATRIX, accession number BL00456C, p-value=1.225e-31, raw score of 24.55
THASEFIGLAGSGAATVIFVSAYELNGLFSVLMLAWSFLPIYIAGQVDMYAGAIFIQQSLHLDLYLAIVGLLAITAVYTVAGGLAAVIYTDALQTLIMLIGALTLMGYSFAAVGGMEGLKEKYFLALASNRSENSSCG

SEQ ID NO: 15098 - protein, 705 aa, Homo sapiens
  DOMAIN (290)..(345): Sodium:solute symporter family proteins domain identified by eMATRIX, accession number BL00456A, p-value=5.909e-34, raw score of 22.59
  DOMAIN (61)..(126): RNA recognition motif. domain identified by PFam, accession name rrm, E-value=0.017, PFam score of 21.2
MNNHVKLIFKILSSLNTTLPSTSAWSSIRASNYNVPLSSTAQSTSGSSWGESSSGRITNWLVLKNLTPQIDGSTLRTLCMQHGPLITFHLNLPHGNALVRYSSKEEVVKAQKSLHMCVLGNTTILAEFASEEEISRFFAQSQSLTPSPGWQSLGSSGAKPVYGFQCMTSDHAPTCQVDEPGNDDKVKLGPLTQRIKFRLNGMKKQQVEVFENTDSEIRLDSSPSFVTCQPCDFGHDLNSQSHHSPCKDPEVSFRTMESGTSSPQPPQLDPLDAFPQKGLEPGDIAVLVLYFLFVLAVGLWSTVKTKRDTVKGYFLAGGDMVWWPVGASLFASNVGSGHFIGLAGSGAATGISVSAYELNAHALKLPRVRHAKKFGFQIPIVAFKDTFVQEVTPFVGAISTCKLVHGTVPCQRQLPEGINVLKDSVKYAVFVNDLTALAVTQTGLGGHVSRTGTHAHWTQHIQPIPRLQERIQDPEEQPRRIDGHRCKVTCRMIPVLALRTGSSGGTSSLPCKEQCPTEKTRTQTLIVLRDPPVSAIKSPRGVRTPVPGRQNADPPRAKQKQRKATMGLMCLPYLLPAECRAVTAHFTRPFLRFSRPPLFSHLTSAGPGREVNPHSATPSGSTTPTGPQDGGPSNWTRRLGSLSVPQFGAVLWHNGRTSRNHIGPTQQVDRTRTDTPVCQIAPSGHSHRQKRNELIDPLCDMRKAI

SEQ ID NO: 15099 - protein, 220 aa, Homo sapiens
  DOMAIN (101)..(156): Sodium:solute symporter family proteins domain identified by eMATRIX, accession number BL00456C, p-value=2.317e-30, raw score of 24.55
  DOMAIN (1)..(220): Sodium:solute symporter family domain identified by PFam, accession name SSF, E-value=4.6e-08, PFam score of 7.1
SLFASNVGSGHFIGLAGSGAATGISVSAYELNGLFSVLMLAWVFLPIYIAGQVTTMPEYLRKRFGGIRIPIILAVLYLFIYIFTKISVDMYAGAIFIQQSLHLDLYLAIVGLLAITAVYTVAGGLAAVIYTDALQTLIMLIGALTLMCYSFAAVGGMEGLKEKYFLALASNRSENSSCGLPREDAFHIFRNPLTSDLPWPGVLFGMSIPSLWYWCTDQGG

SEQ ID NO: 15100 - protein, 103 aa, Homo sapiens
PPATPAPGFPGGPGPPRSPTGLPRQPQGSLQQPAAPPAPLKSSGRPRHGGAGQPSQPGPGAGHRRGRTRAVPQAGPGPQRSSGHGPSWRRGGRAAPGLCPPPP

SEQ ID NO: 15101 - protein, 94 aa, Homo sapiens
  DOMAIN (20)..(72): Plexin repeat domain identified by PFam, accession name Plexin_repeat, E-value=0.0062, PFam score of 23.2
SKKLLFAGSRSQLVQLPVADCIKYRSCADCVLARDPYCAWSVNTSRCVAVGGHFGSLLIQHVMTSDTSGICNLRGSKKVRPTPKNITVVAGTDL

SEQ ID NO: 15102 - protein, 125 aa, Homo sapiens
IRGDTISYTVRSPPPRAGREYAMSTAGPPSPFSPLTQPFPALYREEGKYKIPLNPGAKYVRAPPNPSPQTHSRLHFPSPHPENIHRPWSRTRPTPSPALPLKGHSTLSTPPPYVHRCPTFGGSGG

SEQ ID NO: 15103 - protein, 143 aa, Homo sapiens
GDTGHRERSLGLLREKHTWGPPHPQATPQAAVPSSRYTQPGPQGWVTVQGQPPSRGEHPRPAAGLSQLLHLGVPDIGLGQSGLDCEVTPKPSYSFPGTSGAGPPGTMGSSLPGNGNWDEEAHTLPQGQEGMNEGGVPWRLIFR

SEQ ID NO: 15104 - protein, 58 aa, Homo sapiens
HNTDLFIYCIYEMESCSVTQAGVQWRDLGSLQPPPLGCKQCSCLSLPSSWGLQVPATT

SEQ ID NO: 15105 - protein, 149 aa, Homo sapiens
  DOMAIN (83)..(107): RHODOPSIN-LIKE GPCR SUPERFAMILY SIGNATURE domain identified by eMATRIX, accession number PR00237E, p-value=4.000e-11, raw score of 13.03
  misc_feature (1)...(149): Xaa = X or * as defined in Table 2
LWLRPRGAGIAGAGICLRREGTWLLPLRSHGGKCEAASPWVSQRLELLQKPSALWWPLGLLHVHIFWKYTCAGSFLAGKLLRITFNFFLFFFLPFPISCIFYLFLFLFFFRDGVSLCCSGWPXTPGLKQSSCLSLPSSWDFKCTPLCLL

SEQ ID NO: 15106 - protein, 124 aa, Homo sapiens
MEKEEPGVERKKENRVKEVIHKNRKGAEGPPAGAALPLGGRGEGPSPEPPGGAAAPRAGERCGQLAGASPEPAETGTREPRPRGASAARKLAAAAPVGLLRPGCPRAGRRRAPWPGKRLSEPRV

SEQ ID NO: 15107 - protein, 111 aa, Homo sapiens
ERPGPVGTLTTPTQGPHPPAGPSGRPGSLGFTWPYPGPCTWRPAWFPARPPPAGSITPPGFCTHTLVSLDPGRDCPSPPTGDCDSLCPPHPDASPGIKAFCAQGKKKKKKK

SEQ ID NO: 15108 - protein, 154 aa, Homo sapiens
IRARNYKLRKVMVDGDIPPRVKKDAHELILDFIRSRPPLKQVSERRLRRLPPKQRSLHEKILEEIKQERRLRPVRGEELGCPRVWLSSPASSTPAPEMPSPPPASTCQSQMLGAAPSARVPRVLLKAPTLAEMEEMNTSEIRAQGPRNVTAHNQ

SEQ ID NO: 15109 - protein, 334 aa, Homo sapiens
TGPGVPMCQVGEDYGEPAPEEPPPAPRPSREQKCVKCKEAQPVVVIRAGDAFCRDCFKAFYVHKFRAMLGKNRLIFSGEKVLLAWSGGPSSSSMVWQDLEGLSQDFAKRLRFVAGVIFFDEGAACGQSLEERSKTLAEVKPILQATGFPWHVVALEEELVGSEGAYKAAVDSFRPAAACAGGPGVVLARLKGRNSHPSPSLDPQNLARPPAPAQTEALSQLFCSVRTLTAKEELLQTLRTHLILHVARAHGYSKVMTGDSCTRLAIKLMTNLALGRGAFLAWDTGFSDERHGDVVVVRPMRDHTLKEVAFYNRLFSVPSVFTPAVDTKAPEKAS

SEQ ID NO: 15110 - protein, 132 aa, Homo sapiens
APDTPDSSKFQRSKNYKGPLDPQRGKIEDKVNKSKVILKEPGLEDLGTYSDIVTDADEDISASHTLTEEELEKLKKLSHEIRNPGIKLISGWNIDILERGEARLWLELEKLCPAAELHLIVHNKEIFRLPNR

SEQ ID NO: 15111 - protein, 282 aa, Homo sapiens
  DOMAIN (179)..(194): PHD-finger domain identified by eMATRIX, accession number PF00628, p-value=3.903e-09, raw score of 15.84
  DOMAIN (164)..(212): PHD-finger domain identified by PFam, accession name PHD, E- value=0.00053, PFam score of 20.2
QKKELGHVNGLVDKSGKRTTSPSSDTDLLDRSASKTELKAIAHARILERRASRPGTPTSSASTETPTFEQNDVDEDIIDVDEEPVAAEPDYVQPQLRRPFELLIAAAMERNPTQFQLPNELTCTPALPGSSKRRRKEETTGKNVKKTQRELDHNGLVPLPVKVCFTCNRRCRVAPLIQRDYCPLLFHMDCLEPPLTAMPLGRWMCSNHIEHVVLNHNNMTLSYRCQVFDRFQDTVSQHVVKVDFLNRIHKKHPPNRRVLQSVKRRSLKVPDAIKSQNQVSTP

SEQ ID NO: 15112 - protein, 89 aa, Homo sapiens
  DOMAIN (37)..(81): XPA protein domain identified by eMATRIX, accession number BL00752B, p-value=3.227e-09, raw score of 19.17
MKKKKEEEEEEEEEEEEEEEEKEEEEEEEEEEEEEEEEEEEEEKEEEEEEEEEEEEEEEEEKKKKKKHNIFKILSNLYIFIIIFYCSKK

SEQ ID NO: 15113 - protein, 36 aa, Homo sapiens
KRTRLGMMAHACNLSTLGGQGGRVTRSGVRDQPDLK

SEQ ID NO: 15114 - protein, 488 aa, Homo sapiens
  DOMAIN (226)..(245): Src homology 3 (SH3) domain proteins profile domain identified by eMATRIX, accession number BL50002A, p-value=1.000e- 09, raw score of 14.19
  DOMAIN (222)..(281): SH3 domain identified by PFam, accession name SH3, E-value= 9.2e-07, PFam score of 35.9
LTVIRRVDENWAEGMLADKIGIFPISYVEFNSAAKQLIEWDKPPVPGVDAGECSSAAAQSSTAPKHSDTKKNTRKRHSFTSLTMANKSSQASQNRHSMEISPPVLISSSNPTAAARISELSGLSCSAPSQVHISTTGLIVTPPPSSPVTTGPSFTFPSDDPYQAALGTLNPPLPPPPLLAATVLASTPPGATAAAAAAGMGPRPMAGSTDQIAHLRPQTRPSVYVAIYPYTPRKEDELELRKGEMFLVFERCQDGWFKGTSMHTSKIGGFPGNYVAPVTRAVTNASQAKVPMSTAGQTSRGVTMVSPSTAGGPAQKAQGNGVAGSPSVVPAAVVSAAHIQTSPQAKVLLHMTGQMTVNQARNAVRTVAAHNQERPTAAVTPIQVQNAAGLSPASVGLSHHSLASPQPAPLMPGPATHTAAISISRASAPLACAAAAPLTSPSITSASLEAEPSGRIVTVLPGLPTSPDSASSACGNSSATKPDKDSKK

SEQ ID NO: 15115 - protein, 2121 aa, Homo sapiens
  DOMAIN (2097)..(2112): POLLEN ALLERGEN POA PI SIGNATURE domain identified by eMATRIX, accession number PR00833H, p-value=3.077e-09, raw score of 2.30
LSGITKMTLHATRGAALLSWVNSLHVADPVEAVLQLQDCSIFIKIIDRIHGTEEGQQILKQPVSERLDFVCSFLQKNRKHPSSPECLVSAQKVLEGSELELAKMTMLLLYHSTMSSKSPRDWEQFEYKIQAELAVILKFVLDHEDGLNLNEDLENFLQKAPVPSTCSSTFPEELSPPSHQAKREIRFLELQKVASSSSGNNFLSGSPASPMGDILQTPQFQMRRLKKQLADERSNRDELELELAENRKLLTEKDAQIAMMQQRIDRLALLNEKQAASPLEPKELEELRDKNESLTMRLHETLKQCQDLKTEKSQMDRKINQLSEENGDLSFKLREFASHLQQLQDALNELTEEHSKATQEWLEKQAQLEKELSAALQDKKCLEEKNEILQGKLSQLEEHLSQLQDNPPQEKGEVLGDVLQLETLKQEAATLAANNTQLQARVEMLETERGQQEAKLLAERGHFEEEKQQLSSLITDLQSSISNLSQAKEELEQASQAHGARLTAQVASLTSELTTLNATIQQQDQELAGLKQQAKEKQAQLAQTLQQQEQASQGLRHQVEQLSSSLKQKEQQLKEVAEKQEATRQDHAQQLATAAEEREASLRERDAALKQLEALEKEKAAKLEILQQQLQVANEARDSAQTSVTQAQREKAELSRKVEELQACVETARQEQHEAQAQVAELELQLRSEQQKATEKERVAQEKDQLQEQLQALKESLKVTKGSLEEEKRRAADALEEQQRCISELKAETRSLVEQHKRERKELEEERAGRKGLEARLQQLGEAHQAETEVLRRELAEAMAAQHTAESECEQLVKEVAAWRERYEDSQQEEAQYGAMFQEQLMTLKEECEKARQELQEAKEKVAGIESHSELQISRQQNELAELHANLARALQQVQEKEVRAQKLADDLSTLQEKMAATSKEVARLETLVRKAGEQQETASRELVKEPARAGDRQPEWLEEQQGRQFCSTQAALQAMEREAEQMGNELERLRAALMESQGQQQEERGQQEREVARLTQERGRAQADLALEKAARAELEMRLQNALNEQRVEFATLQEALAHALTEKEGKDQELAKLRGLEAAQIKELEELRQTVKQLKEQLAKKEKEHASGSGAQSEAAGRTEPTGPKLEALRAEVSKLEQQCQKQQEQADSLERSLEAERASRAERDSALETLQGQLEEKAQELGHSQSALASAQRELAAFRTKVQDHSKAEDEWKAQVARGRQEAERKNSLISSLEEEVSILNRQVLEKEGESKELKRLVMAESEKSQKLEESCACCRQRQPATVPELQNAALLCGRRCRASGREAEKQRVASENLRQELTSQAERAEELGQELKAWQEKFFQKEQALSTLQLEHTSTQALVSELLPAKHLCQQLQAEQAAAEKRHREELEQSKQAAGGLRAELLRAQRELGELIPLRQKVAEQERTAQQLRAEKASYAEQLSMLKKAHGLLAEENRGLGERANLGRQFLEVELDQAREKYVQELAAVRADAETRLAEVQREAQSTARELEVMTAKYEGAKVKVLEERQRFQEERQKLTAQVEQLEVFQREQTKQVEELSKKLADSDQASKVQQQKLKAVQAQGGESQQEAQRLQAQLNELQAQLSQKEQAAEHYKLQMEKAKTHYDAKKQQNQELQEQLRSLEQLQKENKELRAEAERLGHELQQAGLKTKEAEQTCRHLTAQVRSLEAQVAHADQQLRDLGKFQVATDALKSREPQAKPQLDLSIDSLDLSCEEGTPLSITSKLPRTQPDGTSVPGEPASPISQRLPPKVESLESLYFTPIPARSQAPLESSLDSLGDVFQDSGRKTRSARRRTTQIINITMTKKLDVEEPDSANSSFYSTRSAPASQASLRATSSTQSLARLGSPDYGNSALLSLPGYRPTTRSSARRSQAGVSSGAPPGRNSFYMGTCQDEPEQLDDWNRIAELQQRNRVCPPHLKTCYPLESRPSLSLGTITDEEMKTGDPQETLRRASMQPIQIAEGTGITTRQQRKRVSLEPHQGPGTPESKKATSCFPRPMTPRDRHEGRKQSTTEAQKKAAPASTKQADRRQSMAFSILNTPKKLGNSLLRRGASKKALSKASPNTRSGTRRSPRIATTTASAATAAAIGATPRAKGKAKH

SEQ ID NO: 15116 - protein, 123 aa, Homo sapiens
  misc_feature (1)...(123): Xaa = X or * as defined in Table 2
GQSPPGHWGHVAQARELLRPGRLPCWVPDGHTPVRPVSGPEPPTGSRILSGEESPSRPPSSQAARPQPGQPRDPSSLRIPLLLPRPXLSQSGLASSGSGLRAGALPRRPPGPALLSPTPCTSI

SEQ ID NO: 15117 - protein, 1763 aa, Homo sapiens
  DOMAIN (778)..(826): Intermediate filaments proteins domain identified by eMATRIX, accession number BL00226B, p-value=3.093e-09, raw score of 23.86
MTLHATRGAALLSWVNSLHVADPVEAVLQLQDCSIFIKIIDRIHGTEEGQQILKQPVSERLDFVCSFLQKNRKHPSSPECLVSAQKVLEGSELELAKMTMLLLYHSTMSSKSPRDWEQFEYKIQAELAVILKFVLDHEDGLNLNEDLENFLQKAPVPSTCSSTFPEELSPPSHQAKREIRFLELQKVASSSSGNNFLSGSPASPMGDILQTPQFQMRRLKKQLADERSNRDELELELAENRKLLTEKDAQIAMMQQRIDRLALLNEKQAASPLEPKELEELRDKNESLTMRLHETLKQCQDLKTEKSQMDRKINQLSEENGDLSFKLREFASHLQQLQDALNELTEEHSKATQEWLEKQAQLEKELSAALQDKKCLEEKNEILQGKLSQLEEHLSQLQDNPPQEKGEVLGDVLQLETLKQEAATLAANNTQLQARVEMLETERGQQEAKLLAERGHFEEEKQQLSSLITDLQSSISNLSQAKEELEQASQAHGARLTAQVASLTSELTTLNATIQQQDQELAGLKQQAKEKQAQLAQTLQQQEQASQGLRHQVEQLSSSLKQKEQQLKEVAEKQEATRQDHAQQLATAAEEREASLRERDAALKQLEALEKEKAAKLEILQQQLQVANEARDSAQTSVTQAQREKAELSRKVEELQACVETARQEQHEAQAQVAELELQLRSEQQKATEKERVAQEKDQLQEQLQALKESLKVTKGSLEEEKRRAADALEEQQRCISELKAETRSLVEQHKRERKELEEERAGRKGLEARLQQLGEAHQAETEVLRRELAEAMAAQHTAESECEQLVKEVAAWRERYEDSQQEEAQYGAMFQEQLMTLKEECEKARQELQEAKEKVAGIESHSELQISRQQNELAELHANLARALQQVQEKEVRAQKLADDLSTLQEKMAATSKEVARLETLVRKAGEQQETASRELVKEPARAGDRQPEWLEEQQGRQFCSTQAALQAMEREAEQMGNELERLRAALMESQGQQQEERGQQEREVARLTQERGRAQADLALEKAARAELEMRLQNALNEQRVEFATLQEALAHALTEKEGKDQELAKLRGLEAAQIKELEELRQTVKQLKEQLAKKEKEHASGSGAQSEAAGRTEPTGPKLEALRAEVSKLEQQCQKQQEQADSLERSLEAERASRAERDSALETLQGQLEEKAQELGHSQSALASAQRELAAFRTKVQDHSKAEDEWKAQVARGRQEAERKNSLISSLEEEVSILNRQVLEKEGESKELKRLVMAESEKSQKLEESCACCRQRQPATVPELQNAALLCGRRCRASGREAEKQRVASENLRQELTSQAERAEELGQELKAWQEKFFQKEQALSTLQLEHTSTQALVSELLPAKHLCQQLQAEQAAAEKRHREELEQSKQAAGGLRAELLRAQRELGELIPLRQKVAEQERTAQQLRAEKASYAEQLSMLKKAHGLLAEENRGLGERANLGRQFLEVELDQAREKYVQELAAVRADAETRLAEVQREAQSTARELEVMTAKYEGAKVKVLEERQRFQEERQKLTAQVEQLEVFQREQTKQVEELSKKLADSDQASKVQQQKLKAVQAQGGESQQEAQRLQAQLNELQAQLSQKEQAAEHYKLQMEKAKTHYDAKKQQNQELQEQLRSLEQLQKENKELRAEAERLGHELQQAGLKTKEAEQTCRHLTAQVRSLEAQVAHADQQLRDLGKFQVATDALKSREPQAKPQLDLSIDSLDLSCEEGTPLSITRSGGSLPPYVCLWSACCLSGCILVR

SEQ ID NO: 15118 - protein, 2108 aa, Homo sapiens
  DOMAIN (2083)..(2098): POLLEN ALLERGEN POA PI SIGNATURE domain identified by eMATRIX, accession number PR00833H, p-value=3.077e-09, raw score of 2.30
  DOMAIN (1527)..(1572): DNA gyrase/topoisomerase IV, subunit A domain identified by PFam, accession name DNA_topoisoIV, E-value=0.054, PFam score of 8.1
  misc_feature (1)...(2108): Xaa = X or * as defined in Table 2
LSGITKMTLHATRGAALLSWVNSLHVADPVEAVLQLQDCSIFIKIIDRIHGTEEGQQILKQPVSERLDFVCSFLQKNRKHPSSPECLVSAQKVLEGSELELAKMTMLLLYHSTMSSKSPRDWEQFEYKIQAELAVILKFVLDHEDGLNLNEDLENFLQKAPVPSTCSSTFPEELSPPSHQAKREIRFLELQKVASSSSGNNFLSGSPASPMGDILQTPQFQMRRLKKQLADERSNRDELELELAENRKLLTEKDAQIAMMQQRIDRLALLNEKQAASPLEPKELEELRDKNESLTMRLHETLKQCQDLKTEKSQMDRKINQLSEENGDLSFKLREFASHLQQLQDALNELTEEHSKATQEWLEKQAQLEKELSAALQDKKCLEEKNEILQGKLSQLEEHLSQLQDNPPQEKGEVLGDVLQLETLKQEAATLAANNTQLQARVEMLETERGQQEAKLLAERGHFEEEKQQLSSLITDLQSSISNLSQAKEELEQASQAHGARLTAQVASLTSELTTLNATIQQQDQELAGLKQQAKEKQAQLAQTLQQQEQASQGLRHQVEQLSSSLKQKEQQLKEVAEKQEATRQDHAQQLATAAEEREASLRERDAALKQLEALEKEKAAKLEILQQQLQVANEARDSAQTSVTQAQREKAELSRKVEELQACVETARQEQHEAQAQVAELELQLRSEQQKATEKERVAQEKDQLQEQLQALKESLKVTKGSLEEEKRRAADALEEQQRCISELKAETRSLVEQHKRERKELEEERAGRKGLEARLLQLGEAHQAETEVLRRELAEAMAAQHTAESECEQLVKEVAAWRDGYEDSQQEEAQYGAMFQEQLMTLKEECEKARQELQEAKEKVAGIESHSELQISRQQNKLAELHANLARALQQVQEKEVRAQKLADDLSTLQEKMAATSKEVARLETLVRKAGEQQETASRELVKEPARAGDRQPEWLEEQQGRQFCSTQAALQAMEREAEQMGNELERLRAALMESQGQQQEERGQQEREVARLTQERGRAQADLALEKAARAELEMRLQNALNEQRVEFATLQEALAHALTEKEGKDQELAKLRGLEAAQIKELEELRQTVKQLKEQLAKKEKEHASGSGAQSEAAGRTEPTGPKLEALRAEVSKLEQQCQKQQEQADSLERSLEAERASRAERDSALETLQGQLEEKAQELGHSQSALASAQRELAAFRTKVQDHSKAEDEWKAQVARGRQEAERKNSLISSLEEEVSILNRQVLEKEGESKELKRLVMAESEKSQKLEESCACCRQRQPATVPELQNAALLCGRRCRASGREAEKQRVASENLRQELTSQAERAEELGQELKAWQEKFFQKEQALSTLQLEHTSTQALVSELLPAKHLCQQLQAEQAAAEKRHREELEQSKQAAGGLRAELLRAQRELGELIPLRQKVAEQERTAQQLRAEKASYAEQLSMLKKAHGLLAEENRGLGERANLGRQFLEVELDQAREKYVQELAAVRADAETRLAEVQREAQSTARELEVMTAKYEGAKVKVLEERQRFQEERQKLTAQVEELSKKLADSDQASKVQQQKLKAVQAQGGESQQEAQRFQAQLNELQAQLSQKEQAAEHYKLQMEKAKTHYDAKKQQNQELQEQLRSLEQLQKENKELRAEAERLGHELQQAGLKTKEAEQTCRHLTAQVRSLEAQVAHADQQLRDLGKFQVATDALKSREPQAKPQLDLSIDSLDLSCEEGTPLSITSKLPRTQPDGTSVPGEPASPISQRLPPKVESLESLYFTPIPARSQAPLESSLDSLGDVFLDSGRKTRSARRRTTQIINITMTKKLDVEEPDSAPNLSFYSTRSAPASQASLRATSSTXSLTRLGSPDYGNSALLSLPGYRPTTRSSARRSQAGVSSGAPPGRNSFYMGTCQDEPEQLDDWNRIAELQQRNRVCPPHLKTCYPLESRPSLSLGTITDEEMKTGDPQETLRRASMQPIQIAEGTGITTRQQRKRVSLEPHQGPGTPESKKATSCFPRPMTPRDRHEGRKQSTTEAQKKAAPASTKQADRRQSMAFSILNTPKKLGNSLLRRGASKKALSKASPNTRSGTRRSPRIATTTASAATAAAIGATPRAKGKAKH

SEQ ID NO: 15119 - protein, 117 aa, Homo sapiens
REGLYLSRFPFHSKLPRTQPDGTSVPGEPASPISQRLPPKVESLESLYFTPIPARSQAPLESSLDSLGDVFLDSGRKTRSARRRTTQIINITMTKVRLLGQGLQGSNSHFLSRASLQ

SEQ ID NO: 15120 - protein, 66 aa, Homo sapiens
LKIFFFFPSGGDMSKNVSQSQMAKLNQQMAKMMDPRVLHHMGGMAGLQSMMRQFQQGAAGNMKGMM

SEQ ID NO: 15121 - protein, 504 aa, Homo sapiens
  DOMAIN (101)..(147): SRP54-type proteins GTP-binding domain proteins domain identified by eMATRIX, accession number BL00300B, p-value=1.000e- 40, raw score of 20.56
  DOMAIN (28)..(295): SRP54-type protein domain identified by PFam, accession name SRP54, E-value=3.8e-145, PFam score of 495.6
  misc_feature (1)...(504): Xaa = X or * as defined in Table 2
MVLADLGRKITSALRSLSNATIINEEVLNAMLKEVCTALLEADVNIKLVKQLRENVKSAIDLEEMASGLNKRKMIQHAVFKELVKLVDPGVKAWTPTKGKQNVIMFVGLQGSGKTTTCSKLAYYYQRKGWKTCLICADTFRAGAFDQLKQNATKARIPFYGSYTEMDPVIIASEGVEKFKNENFEIIIVDTSGRHKQEDSLFEEMLQVANAIQPDNIVYVMDASIGQACEAQAKAFKDKVDVASVIVTKLDGHAKGGGALSAVAATKSPIIFIGTGEHIDDFEPFKTQPFISKLLGMGDIEGLIDKVNELKLDDNEALIEKLKHGQFTLRDMYEQFQNIMKMGPFSQILGMIPGFGTDFMSKGNEQESMARLKKLMTIMDSMNDQELDSTDGAKVFSNNSGRIQRLARPSCVSTSDVQELLTQYTKFAQMVKXMGGIKGLFKGGDMSKNGARSQIAKLNQQMAKMMDPRVLHHMGGMARLQSMMRQFKQGAAGNMKGMMGFNNM

SEQ ID NO: 15122 - protein, 136 aa, Homo sapiens
FGLFNRLPYPPQHPKPHYSRIPGAHAPPGPQNPSTFLSPLYCWGPSSKSPGAPKRCPSSISTPPPSATPPRTLTGSWPGQRCQKDGEAQSYQVRQDPTASPQPAGQSRLPSWSGNQTYLQGLHGRGPRARTLQLPG

SEQ ID NO: 15123 - protein, 119 aa, Homo sapiens
LLIHSSTHPPTYPPIHPPGHHFFLPLFFPFFFSFSPSFHPSTHPLIHLSTYPPIHPSVYPPVPLSLSVYSSIHLPTPEYFLFQPVAHRRSHGRISSMPGEQSPIPRLWKSPSSKPPFPW

SEQ ID NO: 15124 - protein, 555 aa, Homo sapiens
  DOMAIN (147)..(170): Guanine-nucleotide dissociation stimulators CDC24 family sign domain identified by eMATRIX, accession number BL00741B, p-value= 4.326e-16, raw score of 14.27
  DOMAIN (42)..(198): RhoGEF domain identified by PFam, accession name RhoGEF, E- value=3.3e-13, PFam score of 57.3
  misc_feature (1)...(555): Xaa = X or * as defined in Table 2
MLVHTQPPEVHQYNHSSAATRSRFQRLQLQLIWGWSQVLPMSAFYQIIIQASGLRLHACVTPGAGTHSLPFLPSVGNLPSNKGNSRVYCFFAADLFDILLPMLNIYQEFVRNHQYSLQVLANCKQNRDFDKLLKQYEANPACEGRMLETFLTYPMFQIPRYIITLHELLAHTPHEHVERKSLEFAKSKLEELSRMIVEGCDILLDTSQTFIRQGTMKNSNTIIVKHEWGRQLHSDWTLLLSGPDILCSSKEDRSAWPTAVAVPSADDTQAKAQEKLALSKPFHIRLGTMSEQSXSLHQRTEQEGKLPCSGHHRTFTLQIPLNSSAPPLSTAWRTDGGQCPLLCFTGFCFCNSHSCSRTWEPPEEEDDICLPTSQARCNEYVGLRKSIMLVQKKDKKNITCRSLTPSEEGLGTIVKVLVFSEIMFNLDFKIVVEPPDAAAFTVVLLAPSRQEKAAWMSDISQCVDNIRCNGLMTIVFEENSKVTVPHMIKAKVNGCTMSHLDNSLTLPFTDTEQGRSSSWTAGHVKAPCPLHAQLPLLASLFLQELQAFARMSPYP

SEQ ID NO: 15125 - protein, 749 aa, Homo sapiens
  DOMAIN (62)..(102): kw TRANSCRIPTASE REVERSE II ORF2 domain identified by eMATRIX, accession number DM01354Y, p-value=1.000e-40, raw score of 10.69
  DOMAIN (306)..(462): RhoGEF domain identified by PFam, accession name RhoGEF, E- value=6.4e-15, PFam score of 63.0
MTILPKAIYKFNAIPIKIPPSFFTELDKIILKLIWNQKGAHIAKARLSKKNKSGDITLPDFKLYYKATVTKTAWYWYKNRHVDQWNRIENPEINPNTYSQLIFNKRNKNVRCREGTAVQRMLSSKVSEAGYICNQALPTMTGVRRLALETASLGDSPLAHAKATDFELNNELKMNVLRRARRSLARPRPSSPRKESRREYPQAVYFSSVHVFASPSLMQQHQMLVCDVLATGLALSQDDQDDIHLKLEDIIQMKHSLRVSANPPQQQGSAALAVLEVDIIPKAGCVYVCPLSSCLIWGWSQVLPMSAFYQIIIQASGLRLHACVTPGAGTHSLPFLPSVGNLPSNKGNSRVYCFFAADLFDILLPMLNIYQEFVRNHQYSLQVLANCKQNRDFDKLLKQYEANPACEGRMLETFLTYPMFQIPRYIITLHELLAHTPHEHVERKSLEFAKSKLEELSRVMHDEVSDTENIRKNLAIERMIVEGCDILLDTSQTFIRQGTMKNSNTIIVKHEWGRQYILTGRSSSAARTFSAAPRRTEEEDDICLPTSQARCNEYVGLRKSIMLVQKKDKKNITCRSLTPSEEASDPRERLTKMKGAKLNSSAPALRNRFPAVGSKPLLPMSNLVASQIMNYADVSSRANAIEKWVAVADICRCLHNYNGVLEITSALNRSAIYSAAAAAVVWAGWRGVKLKLHFPDSLAAMVLDVNSVPLIDALGKTQKAEVGAIFLWLKVSHGDVSALGQCQHPALGF

SEQ ID NO: 15126 - protein, 1237 aa, Homo sapiens
  DOMAIN (1089)..(1113): Guanine-nucleotide dissociation stimulators CDC25 family sign domain identified by eMATRIX, accession number BL00720B, p-value= 4.103e-18, raw score of 16.57
  DOMAIN (999)..(1184): RasGEF domain identified by PFam, accession name RasGEF, E- value=1.7e-88, PFam score of 307.4
MQKSVRYNEGHALYLAFLARKEGTKRGFLSKKTAEASRWHEKWFALYQNVLFYFEGEQSCRPAGMYLLEGCSCERTPAPPRAGAGQGGVRDALDKQYYFTVLFGHEGQKPLELRCEEEQDGKEWMEAIHQASYADILIEREVLMQKYIHLVQIVETEKIAANQLRHQLEDQDTEIERLKSEIIALNKTKERMRPYQSNQEDEDPDIKKIKKVQSFMRGWLCRRKWKTIVQDYICSPHAESMRKRNQIVFTMVEAESEYVHQLYILVNGFLRPLRMAASSKKPPISHDDVSSIFLNSETIMFLHEIFHQGLKARIANWPTLILADLFDILLPMLNIYQEFVRNHQYSLQVLANCKQNRDFDKLLKQYEANPACEGRMLETFLTYPMFQIPRYIITLHELLAHTPHEHVERKSLEFAKSKLEELSRVMHDEVSDTENIRKNLAIERMIVEGCDILLDTSQTFIRQGSLIQVPSVERGKLSKVRLGSLSLKKEGERQCFLFTKHFLICTRSSGGKLHLLKTGGVLSLIDCTLIEEPDASDDDSKGSGQVFGHLDFKIVVEPPDRAAFTVVLLAPSRQEKAAWMSDISQCVDNIRCNGLMTIVFEENSKVTVPHMIKSDARLHKDDTDICFSKTLNSCKVPQIRYASVERLLERLTDLRFLSIDFLNTFLHTYRIFTTAAVVLGKLSDIYKRPFTSIPVRSLELFFATSQNNRGEHLVDGKSPRLCRKFSSPPPLAVSRTSSPVRARKLSLTSPLNSKIGALDLTTSSSPTTTTQSPAASPPPHTGQIPLDLSRGLSSPEQSPGTVEENVDNPRVDLCNKLKRSIQKAVLESAPADRAGVESSPAADTTELSPCRSPSTPRHLRYRQPGGQTADNAHCSVSPASAFAIATAAAGHGSPPGFNNTERTCDKEFIIRRTATNRVLNVLRHWVSKHAQDFELNNELKMNVLNLLEEVLRDPDLLPQERKAAANILRALSQDDQDDIHLKLEDIIQMTDCMKAECFESLSAMELAEQITLLDHVIFRSIPYEEFLGQGWMKLDKNERTPYIMKTSQHFNDMSNLVASQIMNYADVSSRANAIEKWVAVADICRCLHNYNGVLEITSALNRSAIYRLKKTWAKVSKQTKALMDKLQKTVSSEGRFKNLRETLKNCNPPAVPYLGMYLTDLAFIEEGTPNFTEEGLVNFSKMRMISHIIREIRQFQQTSYRIDHQPKVAQYLLDKDLIIDEDTLYELSLKIEPRLPA

SEQ ID NO: 15127 - protein, 127 aa, Homo sapiens
  DOMAIN (79)..(88): GTP-BINDING ELONGATION FACTOR SIGNATURE domain identified by eMATRIX, accession number PR00315B, p-value=5.800e-10, raw score of 11.66
  DOMAIN (16)..(123): Elongation factor Tu family domain identified by PFam, accession name GTP_EFTU, E-value=5.9e-34, PFam score of 117.1
  misc_feature (1)...(127): Xaa = X or * as defined in Table 2
QGFRKLPLKTTTGKEKTHSCIVGLGHVNSGKTTTTGHLIYKCGGFDKRTIDKFETEAADKAKGSFKNAWDLDKLKAERERGITIDISLWKYETSRYYVTIIVAPXLIDFIINMSTGTSQADCAGLIV

SEQ ID NO: 15128 - protein, 74 aa, Homo sapiens
SLEFSQSKLQYLSRVKHDEVSDTENIRINLAIERMIVEGCDILLDTSQTFIRQWDHENQQHNHSKARVGQAVTF

SEQ ID NO: 15129 - protein, 340 aa, Homo sapiens
GRLGPHWSPQREGEAQAWQAAGPEPCPAGRQLRPGEKSSTAAPGPGAKLPPTARGQRGRPAALSAGPTEPAEPTPTRNSGWPASAPPVPRWGQPLLGVPGPEAGRYSAAPSLSALRFPAWWPQDVPVAWQSATDDAYEALSPSSCAFAMPSSVPAYPSITVTPDEEQNLNHYIQVLENLVRSVPSGEPGREKKSNSPKHVYSIASKGSKFKELVTHGDASTENDVLTNPISEETTTFPTGGFTPEIGKKKHTESTPFWSIKPNNVSIVLHAEEPYIENEEPEPEPEPAAKQTEAPRMLPVVTESSTSPYVTSYKSPVTTLDKSTGIGDLYRIRRCSSALR

SEQ ID NO: 15130 - protein, 113 aa, Homo sapiens
  DOMAIN (23)..(50): Protamine P1 proteins domain identified by eMATRIX, accession number BL00048, p-value=1.788e-09, raw score of 6.39
KERSREKTGGGGDLQREVAREDRRWRRSQREDAREDRRWRRSSERGRLRRQAVAEIFRERDAREDRRWRRSSERGRPRRQRGGGDLQREDAREDRRWRRSSEREMPEKTGGGG

SEQ ID NO: 15131 - protein, 44 aa, Homo sapiens
NPYIYSQLFFDKGTKNIHWGRDSLFNKCCSENLISIIRKIKLDP

SEQ ID NO: 15132 - protein, 222 aa, Homo sapiens
GDPGAGPGDHNRFDCGPQPPPPPKCELLHVAIVCAGHNSSRDVITLVKSMLFYRKNPLHLHMVTGAVARNIMETLFHTWMVPAVRVSFYHADQLKPQVSWIPNKHYSGLYGLMKLVLPSALPAELARVIVLDTDVTFASDISELWALFAHFSGVILLRLDRLRQAGWEQMWRLTARRELLGLPATSLADQDIFNAVIKEHSGLVQRLPCVWNVQLSNHTLAE

SEQ ID NO: 15133 - protein, 426 aa, Homo sapiens
  DOMAIN (51)..(313): Glycosyl transferase family 8 domain identified by PFam, accession name Glyco_transf_8, E-value=1.6e-06, PFam score of 4.3
INFPTTSGLDGDPGAGPGDHNRSDCCPQPPPPPRCELLHVAIVCAGHNSSRDVITLVKSMLFYRKNPLHLHLVTDAVARNILETLFHTWMVPAVRVSFYHADQLKPQVSWIPNKHYSGLYGLMKLVLPSALPAELARVIVLDTDVTFASDISELWALFAHFSDTQAIGLVENQSDWYLGNLWKNHMPWPALGRGFNTGVILLRLDRFRKAGWEQMWRLTARRELLSLPATSLADQDIFNAVIKEHPGLVQRLPCVWNVQLSDHTLAERCYSEASDLKVIHWNSPKKVLVKNNHVEFFRKIYLILLENQGNLLLEEVFLCPSQPPTGADQLQRPLPQLDEEDPCFEFRQQQLTVHRGHLLFLPHEPPPPRPHDVTLVAQLSMDRLQMLEALCRHCPGPVSLALYLTDAEAQQFLHFVEANGVGIDRV

SEQ ID NO: 15134 - protein, 96 aa, Homo sapiens
RVSRGRKWFFIALKRMPAMKKAMNLFLGLSNVRTVHPEGFTVYISTHISFPSLSGYRTGLRSFGLVKQKKSPIRMPCVYTNPCVSIVSRMAQASSL

SEQ ID NO: 15135 - protein, 317 aa, Homo sapiens
MATAATIPSVATATAAALGEVEDEGLLASLFRDRFPEAQWRERPDVGRYLRELSGSGLERLRREPERLAEERAQLLQQTRDLAFANYKTFIRGAECTERIHRLFGDVEASLGRLLDRLPSFQQSCRSPRAARNAVSIMAAGAGTAGPASGPGVVRDPAASQPRKRPGREGGEGARRSDTMAGGGGSSDGSGRAAGRRASRSSGRARRGRHEPGLGGPAERGAGEARLEEAVNRWVLKFYFHEALRAFRGSRYGDFRQIRDIMQALTFFRGTLDQSSKQELSLDLSSESIKNIQVNITYSLRSRDCANFDILYDIKPF

SEQ ID NO: 15136 - protein, 103 aa, Homo sapiens
MKTKVQPRLTVRVARNCSPKNKAHDNKQNWSWEEDSQITEPSAGLNSSQEAVSAPPSKPTVFNQPLPGEKNPKYEDLLCRNFGAGWWSWLGLVLLPGIKETFS

SEQ ID NO: 15137 - protein, 57 aa, Homo sapiens
PLIACSFFLFLFFFFLRQSLGSVHPGLGVQWRDLGSLRPPFPGLTQFSCLSLPRSWN

SEQ ID NO: 15138 - protein, 70 aa, Homo sapiens
  misc_feature (1)...(70): Xaa = X or * as defined in Table 2
CSAETEREIGRRKXCIQESSSPSPLSIKKCPICKADXYLXSHLGATADAAPLFQLSSLXQDLPSYREADL

SEQ ID NO: 15139 - protein, 43 aa, Homo sapiens
KIMLCFQLTTCPRMMSITSSAMWMRMVWSVEQVFLSNSVQKMR

SEQ ID NO: 15140 - protein, 67 aa, Homo sapiens; identical to SEQ ID NO: 14981

SEQ ID NO: 15141 - protein, 92 aa, Homo sapiens
LVLRLRNSRKELNVFLFEFTPGRDTADGVSQELFSAGLVDGHDVFIVAANLQKIVDDPKALKTLTFKLASGCDGSEIPDEVKLIGFAQVSVS

SEQ ID NO: 15142 - protein, 374 aa, Homo sapiens
MRPGSLTDVTLEPRSEGGKEKSIPERRNGPCKDPGAAACKLCLTSVLFATNRHMYLHNLLLRQGVSRASRQSALTQSSGTPAMYQCSKTYYIFQGIQVDYQEVTHTGPLSIEGSMLDIIKYIVNRGEHKNGVLEEAIIATILKEVLEGLDYLHRNGQIHRNSRKELNDIRFEFTPGRGPKGNDGECDEKHTTVLMRVEQQWDHTERKTQTQMSTEAKVNDTADGVSQELFSAGLVDGHDVVIACPSRNLRLFIGIISTFPGAQAKTLGIVLDFSFSHTSHPTHLNVPRILPLLTISHPITFQAPLNSQLSSCIHPFAAIPASVLASLQPVLISTARDPGTSHYSSALGFIGQQIPAYMELSPVIGELCLSKVTE

SEQ ID NO: 15143 - protein, 540 aa, Homo sapiens
  DOMAIN (307)..(357): UDP-glycosyltransferases proteins domain identified by eMATRIX, accession number BL00375E, p-value=1.000e-40, raw score of 18.75
  DOMAIN (36)..(538): UDP-glucoronosyl and UDP-glucosyl transferas domain identified by PFam, accession name UDPGT, E-value=0, PFam score of 1163.9
AATGKQALHCIRMSMKWTSALLLIQLSCYFSSGSCGKVLVWPTEFSHWMNIKTILDELVQRGHEVTVLASSASISFDPNSPSTLKFEVYPVSLTKTEFEDIIKQLVKRWAELPKDTFWSYFSQVQEIMWTFNDILRKFCKDIVSNKKLMKKLQESRFDVVLADAVFPFGELLAELLKIPFVYRPRFSPGYAIEKHSGGLLFPPSYVPVVMSELSDQMTFIERVKNMIYVLYFEFWFQIFDMKKWDQFYSEVLGRPTTLSETMAKADIWLIRNYWDFQFPHPLLPNVEFVGGLHCKPAKPLPKEMEEFVQSSGENGVVVFSLGSMVSNTSEERANVIASALAKIPQKVLWRFDGNKPDTLGLNTRLYKWIPQNDLLGHPKTRAFITHGGANGIYKAISPRIPMVGVPLFADQPDNIAHMKAKGAAVSLDFHTMSSTDLLNALKTVINDPLYKENAMKLSRIHHDQPVKPLDRAVFWIEFVMRHKGAKHLRVAAHDLTWFQYHSLDVTGFLLACVATVIFIITKCLFCVWKFVRTGKKGKRD

SEQ ID NO: 15144 - protein, 232 aa, Homo sapiens
  DOMAIN (187)..(215): UDP-glycosyltransferases proteins domain identified by eMATRIX, accession number BL00375D, p-value=5.821e-28, raw score of 14.56
  DOMAIN (69)..(222): UDP-glucoronosyl and UDP-glucosyl transferas domain identified by PFam, accession name UDPGT, E-value=7.6e-59, PFam score of 208.9
MAAKLVGIEFDPCWVKMLMEKGHQKTREHNYPSMEQSEKAGVTDNIQGKTKALAGSRQSVANGKNSHCKENVTWLLIIHYVQPMKPYEVFWIEFVTHQKATKYLCQLPTTSPDAVFPFGELLAELLKIPFVYSLRFSPGYAIEKHSGGLLFPPSYVPVVMSELSDQMTFIERGRPTTLSETMAKADIWLIRNYWDFQFPHPLLPNVEFVGGLHCKPAKPLPKTLGHGWDRAP

SEQ ID NO: 15145 - protein, 528 aa, Homo sapiens
  DOMAIN (295)..(345): UDP-glycosyltransferases proteins domain identified by eMATRIX, accession number BL00375E, p-value=1.000e-40, raw score of 18.75
  DOMAIN (24)..(526): UDP-glucoronosyl and UDP-glucosyl transferas domain identified by PFam, accession name UDPGT, E-value=0, PFam score of 1163.9
MSMKWTSALLLIQLSCYFSSGSCGKVLVWPTEFSHWMNIKTILDELVQRGHEVTVLASSASISFDPNSPSTLKFEVYPVSLTKTEFEDIIKQLVKRWAELPKDTFWSYFSQVQEIMWTFNDILRKFCKDIVSNKKLMKKLQESRFDVVLADAVFPFGELLAELLKIPFVYRPRFSPGYAIEKHSGGLLFPPSYVPVVMSELSDQMTFIERVKNMIYVLYFEFWFQIFDMKKWDQFYSEVLGRPTTLSETMAKADIWLIRNYWDFQFPHPLLPNVEFVGGLHCKPAKPLPKEMEEFVQSSGENGVVVFSLGSMVSNTSEERANVIASALAKIPQKVLWRFDGNKPDTLGLNTRLYKWIPQNDLLGHPKTRAFITHGGANGIYKAISPRIPMVGVPLFADQPDNIAHMKAKGAAVSLDFHTMSSTDLLNALKTVINDPLYKENAMKLSRIHHDQPVKPLDRAVFWIEFVMRHKGAKHLRVAAHDLTWFQYHSLDVTGFLLACVATVIFIITKCLFCVWKFVRTGKKGKRD

SEQ ID NO: 15146 - protein, 540 aa, Homo sapiens
  DOMAIN (307)..(357): UDP-glycosyltransferases proteins domain identified by eMATRIX, accession number BL00375E, p-value=1.000e-40, raw score of 18.75
  DOMAIN (36)..(540): UDP-glucoronosyl and UDP-glucosyl transferas domain identified by PFam, accession name UDPGT, E-value=0, PFam score of 1153.7
AATGKQALHCIRMSMKWTSALLLIQLSCYFSSGSCGKVLVWPTEFSHWMNIKTILDELVQRGHEVTVLASSASISFDPNSPSTLKFEVYPVSLTKTEFEDIIKQLVKRWAELPKDTFWSYFSQVQEIMWTFNDILRKFCKDIVSNKKLMKKLQESRFDVVLADAVFPFGELLAELLKIPFVYRPRFSPGYAIEKHSGGLLFPPSYVPVVMSELSDQMTFIERVKNMIYVLYFEFWFQIFDMKKWDQFYSEVLGRPTTLSETMAKADIWLIRNYWDFQFPHPLLPNVEFVGGLHCKPAKPLPKEMEEFVQSSGENGVVVFSLGSMVSNTSEERANVIASALAKIPQKVLWRFDGNKPDTLGLNTRLYKWIPQNDLLGHPKTRAFITHGGANGIYEAIYHGIPMVGVPLLADQPDNIAHMKAKGAAVSLDFHTMSSTDLLNALKTVINDPLYKENAMKLSRIHHDQPVKPLDRAVFWIEFVMRHKGAKHLRVAAHDLTWFQYHSLDVTGFLLACVATVIFIITKCLFCVWKFVRTGKKGKRD

SEQ ID NO: 15147 - protein, 62 aa, Homo sapiens
  misc_feature (1)...(62): Xaa = X or * as defined in Table 2
SGRPFFFFFGLPFLFFFFFFXDRVSLLLPRLQCNGTISAHCNLCLPGSSDSPASASRVAELP

SEQ ID NO: 15148 - protein, 95 aa, Homo sapiens
  misc_feature (1)...(95): Xaa = X or * as defined in Table 2
SKRCLSLGRGASSLEAAEHLSCCPQADGLSRSPQWASAPPRQLLSCPSAGPRGPLQLARSPGSRRGPWVPPQGPPHQHSALTIXAPAQRKRRKNG

SEQ ID NO: 15149 - protein, 92 aa, Homo sapiens
  DOMAIN (1)..(92): Elongation factor Tu family domain identified by PFam, accession name GTP_EFTU, E-value=5.9e-26, PFam score of 90.1
DVYKIGGIGTVPVGRVETGVLKPGMVVTFAPVNVTTEVKSVEMHHEALSEALPGDNVGFNVKNVSVKDVRRGNVAGDSKNDPPMEAAGFTAQ

SEQ ID NO: 15150 - protein, 120 aa, Homo sapiens
  DOMAIN (93)..(107): GTP-binding elongation factors proteins domain identified by eMATRIX, accession number BL00301C, p-value=8.200e-15, raw score of 11.73
  DOMAIN (1)..(64): Elongation factor Tu family domain identified by PFam, accession name GTP_EFTU, E-value=1.4e-11, PFam score of 41.6
MHHEALSEALPGDNVGFNVKNVSVKDVRRGNVAGDSKNDPPMEAAGFTAQVIILNHPGQISAGYALYWIAIVDMVPGKPMCVESFSDYPPLGRFAVRDMRQTVAVGVIKAVDKKAAGLAS

SEQ ID NO: 15151 - protein, 173 aa, Homo sapiens
  DOMAIN (134)..(148): GTP-binding elongation factors proteins domain identified by eMATRIX, accession number BL00301C, p-value=8.200e-15, raw score of 11.73
  DOMAIN (4)..(118): Elongation factor Tu family domain identified by PFam, accession name GTP_EFTU, E-value=1.1e-26, PFam score of 92.6
FAPVNVTTEVKSVEMHHEALSEALPGDNVGFNVKNVSVKDVRRGNVAGDSKNDPPMEAAGFTAQVIILNHPGQISAGYAPVLDCHTAHIACKFAELKEKIDRRSGKKLEDGPKFMVPGKPMCVESFSDYPPLGRFAVRDMRQTVAVGVIKAVDKKAAGAGKVTKSARKLQKAK

SEQ ID NO: 15152 - protein, 53 aa, Homo sapiens
  DOMAIN (1)..(44): Elongation factor Tu family domain identified by PFam, accession name GTP_EFTU, E-value=3.8e-08, PFam score of 30.1
  misc_feature (1)...(53): Xaa = X or * as defined in Table 2
MVVTFAPVNVTTEVKSVEMHHEALSEALPGDNVGFNVKNVSVKCWIWFLASPX

SEQ ID NO: 15153 - protein, 50 aa, Homo sapiens
  DOMAIN (1)..(50): Elongation factor Tu family domain identified by PFam, accession name GTP_EFTU, E-value=1.6e-06, PFam score of 24.6
MHHEALSEALPGDNVGFNVKNVSVKDVRRGNVAGDSKNDPPMEAAGFTAQ

SEQ ID NO: 15154 - protein, 103 aa, Homo sapiens
  DOMAIN (1)..(99): Elongation factor Tu family domain identified by PFam, accession name GTP_EFTU, E-value=7.9e-09, PFam score of 32.4
RYEEVVKEVSTYIKKIGYNPDTVAFVPISGWNGDNMLEPSANMPWFKGWKVTRKDGNASGTTLLEALDCILPPTRPTDKPLRLPLQDVYKIGGIGTVPVQKAK

SEQ ID NO: 15155 - protein, 181 aa, Homo sapiens
  DOMAIN (7)..(164): Elongation factor Tu family domain identified by PFam, accession name GTP_EFTU, E-value=2.4e-46, PFam score of 158.9
INPPPPTVPVGRVETGVLKPGMVVTFAPVNVTTEVKSVEMHHEALSEALPGDNVGFNVKNVSVKDVRRGNVAGDSKNDPPMEAAGFTAQVIILNHPGQISAGYAPVLDCHTAHIACKFGRVETGVLKPGMVVTFAPVNVTTEVKSVEMHHEALSEALPGDNVGFQCQECVCQGCSSWQRCW

SEQ ID NO: 15156 - protein, 122 aa, Homo sapiens
  DOMAIN (48)..(117): Elongation factor Tu family domain identified by PFam, accession name GTP_EFTU, E-value=7.7e-23, PFam score of 79.6
IGYNPDTVACVPILGWNGDNMLEQSANMPWFKGWKVTRKDGNASGTTLLEALDCILPPTRPTDKPLRLPLQDVYKIGGIGTVPVGRVETGVLKPGMVVTFAPVNVTTEVKSVEMHHEAQKAK

SEQ ID NO: 15157 - protein, 169 aa, Homo sapiens
  DOMAIN (130)..(144): GTP-binding elongation factors proteins domain identified by eMATRIX, accession number BL00301C, p-value=8.200e-15, raw score of 11.73
  DOMAIN (3)..(114): Elongation factor Tu family domain identified by PFam, accession name GTP_EFTU, E-value=1.3e-15, PFam score of 55.2
EAGISKNGQTREHALLAYTLGVKQLIVGVNKMDSTEPPYSQKRYEEIVKEVSTYIKKIGYNPDTVAFVPISGWNIACKFAELKEKIDRRSGKKLEDGPKFLKSGDAAIVDMVPGKPMCVESFSDYPPLGRFAVRDMRQTVAVGVIKAVDKKAAGAGKVTKSAQKAQKAK

SEQ ID NO: 15158 - protein, 366 aa, Homo sapiens
  DOMAIN (26)..(58): GTP-binding elongation factors proteins domain identified by eMATRIX, accession number BL00301B, p-value=9.000e-28, raw score of 20.09
  DOMAIN (4)..(353): Elongation factor Tu family domain identified by PFam, accession name GTP_EFTU, E-value=7.7e-117, PFam score of 396.4
MQSERGITIDISLWKFETSKYYVTIIDAPGHRDFIQNMITGTSQADCAVLIVAAGVGEFEAGISKNGQTREHALLAYTLGVKQLIVGVNKMDSTEPPYSQKRYEEIVKEVSTYIKKIGYNPDTVAFVPISGWNGDNMLEPSANMPWFKGWKVTRKDGNASGTTLLEALDCILPPTRPTDKPLGLPLQDVYKIGGIGTVPVGRVETGVLKPGMVVTFGPVNVTTEVKSVEMHHEALGEALPGDNVGFNVKNVSVKDVRRGNVAGDSKNDPPMEAAGFPAQVIILNHPGQISAGYAPVLDCHTAHIACKFAELKEKIDRRSGKKLEDGPKFLKSGDAAIVDMVPGKPMCVESFSDWQGHQVCPESSEG

SEQ ID NO: 15159 - protein, 205 aa, Homo sapiens
  DOMAIN (157)..(180): Galactokinase proteins domain identified by eMATRIX, accession number BL00106A, p-value=9.308e-12, raw score of 14.00
MEQVKTAALINGKILPRIPNEQKENADTSLAFSFISQQDGELTMLRERVRIEIASTHIALQHAIVTGDAVGMDDIPQEARQYRHNQAYAYSIQGDGAEDDDERIVRFHTRVTVDSDTLASDAARLTCRHAGVTGYFVHITVRKMLCDKQDTAAIHSRHTTAHRGEHIDYCGYSVLPMAVEQDVLIAVEPVKTYALQLANTNPLYP

SEQ ID NO: 15160 - protein, 434 aa, Homo sapiens
  DOMAIN (59)..(91): GTP-binding elongation factors proteins domain identified by eMATRIX, accession number BL00301B, p-value=5.500e-31, raw score of 20.09
  DOMAIN (48)..(374): Elongation factor Tu family domain identified by PFam, accession name GTP_EFTU, E-value=1.9e-94, PFam score of 320.9
SLVMLPLFDMVPGQAHVLLRASQDYPPFGSLCWFVIMRTDSCGWVSIKSSGQKRLLELIDAPGHRDFIKNMITGTSQADCAVLIVAAGVGEFEAGISKNGQTREHALLAYTLGVKQLIVGVNKMDSTEPPYSQKRYEEIVKEVSTYIKKIGYNPDTVAFVPISGWNGDNMLEPSANMPWFKGWKVTRKDGNASGTTLLEAVDCILPPTRPTDKPLRLPLQDVYKIGGIGTVPVGRVETGVLKPGMVVTFAPVNVTTEVKSVEMHHEALSEALPGDNVGFNVKNVSVKDVRRGNVAGDSKNDPPMEAAGFTAQVIILNHPGQISAGYAPVLDCHTAHIACKFAELKEKIDRRSGKKLEDGPKFLKSGDAAPLVDMVPGKPHVCLRSFSDYPPLGRFAVRDMRQTVAVGVIKSSVDKKAAGAGKVTKSAQKAQKAK

SEQ ID NO: 15161 - protein, 107 aa, Homo sapiens
AEKWARNMPFFPDLQMTDQVSLLRLTWSELFGLNAAQCSMPLNEAPLLAAAGLQAYPMSADRRVAFMDHIRIFQEQAEKFRALHVGSPEKQCLKAIVLFTSNTWGRG

SEQ ID NO: 15162 - protein, 122 aa, Homo sapiens
FISSIKFIMSFNFTSLFHFFISLGQFISSHYISSKSHFISFHVISSVHLIFSSHHFMGSSQQLFSSDHFIISCHRFMSYLLRSVQFHFNISFHYFRSSHLITSCHHISSCNQNSSSSQHFIS

SEQ ID NO: 15163 - protein, 144 aa, Homo sapiens
TQGSHQSPPPGSPHAAHTCCPGRGGEAGGTGSLCLLGQGHTREPAALKDWPGGRPEGHKVRSDPPGRPASSTVQLKGLSGERDGCPPLRRGPGPHRAEGSPSRALRPPGTRGNTATRTPVSSGMRAASCQAWRNEVRSLMVQAP

SEQ ID NO: 15164 - protein, 142 aa, Homo sapiens
VSCAPGYVLKGQASIKCVLGHPSHWSDPPPICRAASLDGFYNSRSLDVAKAPAASSTLDAAHTAAAIFLPLVAMVLLVGGVYFYFSRRRENMKSPSRWGQSREVNSDLHHSPAARLLASCCPSTSCIYHLGGDAAKPVLRPL

SEQ ID NO: 15165 - protein, 110 aa, Homo sapiens
FFFFFFQKHHFNKETTEIKDCSLAGAQTPYNTLHVQSGFQPAPGRLPGALLPPVPCQIPGSLDYWLLSRNMPTPSPYPITQWVKRESLTSGLGIGRRGLLGVKDVCNSLN

SEQ ID NO: 15166 - protein, 408 aa, Homo sapiens
  DOMAIN (58)..(85): STREPTOMYCES SUBTILISIN INHIBITOR SIGNATURE domain identified by eMATRIX, accession number PR00294A, p-value=6.444e-10, raw score of 10.44
  DOMAIN (257)..(313): Sushi domain (SCR repeat) domain identified by PFam, accession name sushi, E-value=6.1e-05, PFam score of 29.8
SPPSPLPGLASQDSRPVFPSPTPAMAAVPTQPQSKEGPWSPESESPMLRITAPLPPGPSMAVPTLGPGEIASTTPPSRAWTPTQEGPGDMGRPWVAEVVSQGAGIGIQGTITSSTASGDDEETTTTTTIITTTITTVQTPGPCSWNFSGPEGSLDSPTDLSSPTDVGLDCFFYISVYPGYGVEIKVQNISLREGETVTVEGLGGPDPLPLANQSFLLRGQVIRSPTHQAALRFQSLPPPAGPGTFHFHYQAYLLSCHFPRRPAYGDVTVTSLHPGGSARFHCATGYQLKGARHLTCLNATQPFLWDLKEPVCIAACGGVIRNATTGRIVSPGFPGNYSNNLTCHWLLEAPEGQRLHLHFEKVSLAEDDDRLIIRNGDNVEAPPVYDSYEVEYPPPPPPLQPHYHRVSV

SEQ ID NO: 15167 - protein, 77 aa, Homo sapiens
  DOMAIN (18)..(72): Heat shock hsp70 proteins family proteins domain identified by eMATRIX, accession number BL00297H, p-value=8.043e-24, raw score of 15.46
  misc_feature (1)...(77): Xaa = X or * as defined in Table 2
FVLFPTKVYEGERAMTKDNNLLGKFELTGIPPAPXGVPQIEVTFDIDANGILNVSAVDKSTGKENKITITNDKGKEA

SEQ ID NO: 15168 - protein, 111 aa, Homo sapiens
  DOMAIN (78)..(98): CORONAVIRUS NUCLEOCAPSID PROTEIN domain identified by eMATRIX, accession number DM01206B, p-value=6.910e-11, raw score of 10.69
  misc_feature (1)...(111): Xaa = X or * as defined in Table 2
NFCTREDHQYAPLDPKHGHLPPRMPPSERLMAAEAAFYSPPYHDRPTNSEGWEHTGLYESFRAKLRSPRRKGPEKRNSGPSRSRNRSKSRGRSSSRSNSRSSXSSGSYSRS

SEQ ID NO: 15169 - protein, 99 aa, Homo sapiens; identical to SEQ ID NO: 14596
  DOMAIN (33)..(44): Uroporphyrinogen decarboxylase proteins domain identified by eMATRIX, accession number BL00906E, p-value=5.950e-13, raw score of 13.41
  DOMAIN (1)..(92): Uroporphyrinogen decarboxylase (URO-D) domain identified by PFam, accession name URO-D, E-value=0.024, PFam score of -186.4

SEQ ID NO: 15170 - protein, 85 aa, Homo sapiens
  misc_feature (1)...(85): Xaa = X or * as defined in Table 2
CLAHSRHSINISTCTGAEGHESESFSYWGTRGPSATMACDGLTRTGHSSPSRARSPPLLCARSLTKAACQXAVPVTWCHCWRPQG

SEQ ID NO: 15171 - protein, 106 aa, Homo sapiens
  DOMAIN (63)..(86): Galactokinase proteins domain identified by eMATRIX, accession number BL00106A, p-value=3.348e-15, raw score of 14.00
  misc_feature (1)...(106): Xaa = X or * as defined in Table 2
RSSLLPCLGLWTHLIPVKVRDSLGPEAFRGEKADMPVLYDRLLKLMEMLYFKSGTIPMFYGXAPRRVYIIGERIHYCGYSVLPMAVEQDVLIAVEPVKTYALQLAN

SEQ ID NO: 15172 - protein, 194 aa, Homo sapiens
  DOMAIN (68)..(118): Uroporphyrinogen decarboxylase proteins domain identified by eMATRIX, accession number BL00906B, p-value=1.000e-40, raw score of 22.56
  DOMAIN (20)..(191): Uroporphyrinogen decarboxylase (URO-D) domain identified by PFam, accession name URO-D, E-value=9.7e-19, PFam score of 75.7
HTDTYPHPHLIARPQGFPELKNDTFLRAAWGEETDYTPVWCMRQAGRYLPEFRETRAAQDFFSTCRSPEACCELTLQPLRRFPLDAAIIFSDILVVPQALGMEVTMVPGKGPSFPEPLREEQDLERLRDPEVVASELGYVFQAITLTRQRLAGRVPLIGFAGAPVMWDRAGTRGAGRSLWKVWGRQKEGSVWLL

SEQ ID NO: 15173 - protein, 112 aa, Homo sapiens
  misc_feature (1)...(112): Xaa = X or * as defined in Table 2
GTSFYLYRKGYLSLSKGVPMSHYAGTLLLLLAGVACLRGIVRWTNPHYRKTMTIPXASHRNQSSKYPRHVANYNCDFRSWPDDFHCDEPITRNESQGGPIRRSVHTASPKPM

SEQ ID NO: 15174 - protein, 130 aa, Homo sapiens
  misc_feature (1)...(130): Xaa = X or * as defined in Table 2
ILDCHTDDSGTYRAVCTNYKGEASDYATLDVTGGDYTTYASQRIDEEVPRSDFPELTRTEAYAVSSFKKTSEMEASSSVREVKSQMTETRESLSSYEHSASAXMKSAALXEKSLEEKSTTRKIKTTLAAR

SEQ ID NO: 15175 - protein, 77 aa, Homo sapiens
  DOMAIN (5)..(69): Myosin tail domain identified by PFam, accession name Myosin_tail, E-value=2.9e-14, PFam score of 57.7
VNSAEEAEEQANTNLSKFRKVQHELDEAVALPHFDLLIQLVLHLADEAEERADIAESQVNKLRAKSRDIGTGGLNEE

SEQ ID NO: 15176 - protein, 184 aa, Homo sapiens
  DOMAIN (4)..(143): Myosin tail domain identified by PFam, accession name Myosin_tail, E-value=8.4e-39, PFam score of 142.3
MRPHRLDEAEQIALKGFFKQLQKLEARGRELENELEAEQKRNAESVKGMRKSERTPSKELTYQTEEDRKNLAAACRTLVDKLQLKAKAYKRQAEEAEEQSPTPNLSKFRKVQARAGLRAEERADIAESQVNKLRAKSRDIGTKGLEMKELAFATSLNLAPPLGRCPANAPCWSLCNSFLGREAE

SEQ ID NO: 15177 - protein, 99 aa, Homo sapiens
  DOMAIN (13)..(46): PROLINE-RICH PROTEIN 3 domain identified by eMATRIX, accession number DM00215, p-value=8.322e-09, raw score of 19.43
  misc_feature (1)...(99): Xaa = X or * as defined in Table 2
GRRPPALIDSRSPSPASPPTQXCRPPSFPGPAPPPRLWLAPPFCPPPPPHGYGPFPARKRRGAALGLTRVLPSPGSAVRRSPGPGPGSACDKVFRTTSR

SEQ ID NO: 15178 - protein, 66 aa, Homo sapiens
  misc_feature (1)...(66): Xaa = X or * as defined in Table 2
RRTYTSHLLACLRQGLAFSPRLECGGKIRAHCSLQLYGSSDPPTXAPQTAGTKQHNQRIAQCNADN

SEQ ID NO: 15179 - protein, 89 aa, Homo sapiens
  misc_feature (1)...(89): Xaa = X or * as defined in Table 2
FFLRQSHSVTRLECTGAIXAHCNLCLPGSSDSPASASXVAGITGMCHHARLIFVFLVETGFHHVGQAVLELLNLMICPPQPPKVLGLQA

SEQ ID NO: 15180 - protein, 104 aa, Homo sapiens
  misc_feature (1)...(104): Xaa = X or * as defined in Table 2
FYLSEEAEFFFFFFETESHLLSPRLECSGMMSAHCNLRLPGSSDSPASASXVAGITGGHHPAQLIFVAFMYQPGFCHVGQAGQQLLAXVICLPQPPKVLGITGA

SEQ ID NO: 15181 - protein, 180 aa, Homo sapiens
  misc_feature (1)...(180): Xaa = X or * as defined in Table 2
LSIFFFFFFEGRGAIVANVSLNFPGSKKPPPSLSKEPGTTGAAPPREIFFPPKKTRLGFALHPGSPPPPGPWAPLWSKGEKVGILKKHKVGRGRGFSPVSPPFXKPPPSLSKEPGTTGAAPPREIFFPPKKTRLGFALHPGSPPPPGPWAPLWSKGEKVGILKKHKVGRGRGFSPVSPPF

SEQ ID NO: 15182 - protein, 155 aa, Homo sapiens
  misc_feature (1)...(155): Xaa = X or * as defined in Table 2
ARFLPKYQSPTGPHPSFNAFLSLGAMCVLPRPNFHSLAVRSPIVPGGPAPLVPGKEXEGLGVTSQSRPDCPSPMSGTPRCRSXLRPAAGRGCSPLLGGCPWTVTHPLRTKAGCTLSWAQQPVVLPVGGEGPRCASPVAVLGFSPCALCHLDPPVK

SEQ ID NO: 15183 - protein, 113 aa, Homo sapiens
  misc_feature (1)...(113): Xaa = X or * as defined in Table 2
GTSQVLTLTIAEVXXNLGXVGCKXCKHTEAKRMPCAEDYLSVVHEQICVAHENTPVSDRVPIRCPESLAIRLPCFSALEVDETYGDXEYNAEAFTLHADICTLSEKERPIKKQ

SEQ ID NO: 15184 - protein, 110 aa, Homo sapiens
IESSLHQVESMHGAGNAKKNWQRIQEHFFFATFHPLKDYCLEGTNLVEADNQAEWTDVQKKIIPWNSRVSDLDLELLFQDRAARLGKSISRLIRCGPSLHSDKPTNFREG

SEQ ID NO: 15185 - protein, 307 aa, Homo sapiens
YGEENLKTSICTFLAVLSHLDIITQNIPEKKLILKQALIVVLQWCFNHNFSVRLYALVALKKLWTVCKVLSVEEFDALTPVIESSLHQVESMHGAGNAKKNWQRIQEHFFFATFHPLKDYCLETIFYILPRLSGLIEDEWITIDKFTRFTDVPLAAGFQWYLSQTQLSKLKPGDWSQQDIGTNLVEADNQAEWTDVQKKIIPWNSRVSDLDLELLFQDRAARLGKSISRLIVVASLIDKPTNLGGLCRTCEVFGASVLVVGSLQCISDKQFQHLSVSAEQWLPLVEVKPPQLIDYLQQKKTEGYTII

SEQ ID NO: 15186 - protein, 119 aa, Homo sapiens
  DOMAIN (2)..(13): Trp-Asp (WD) repeat proteins proteins domain identified by eMATRIX, accession number BL00678, p-value=6.211e-09, raw score of 9.67
  misc_feature (1)...(119): Xaa = X or * as defined in Table 2
ATCSSDQSVKVWDKSESGDWHCTASWKTHSGSVWRVTWAHPEFGQVLAFCTFDRSSAVWDEILSESRDNLXGHTHWVKRTTLEDSIVSATCVXSFLSHVGIMLLSCGTFFPACICGVFP

SEQ ID NO: 15187 - protein, 99 aa, Homo sapiens
  misc_feature (1)...(99): Xaa = X or * as defined in Table 2
SHLLRSLRQENRLNPRGGGCNQPRSGHCTPAWATRAKLHLKKQTNKMLANLIQQHIKKVIHHYQVGFTPGMQGXFNICKSVSVIYHINRTTHKNVAAAA

SEQ ID NO: 15188 - protein, 71 aa, Homo sapiens
  misc_feature (1)...(71): Xaa = X or * as defined in Table 2
AASTMPMSFEWQRQXRFPPFYTLQPNVNTRQKQLTAXCSLVLSLCRLHKQSSMTLIKTRLTSDSITVMLDC

SEQ ID NO: 15189 - protein, 106 aa, Homo sapiens
  misc_feature (1)...(106): Xaa = X or * as defined in Table 2
QHFWERFHVTKDRINTVERQETDWKIFATYLMKKVXISRKCYNSYKLVRKKQLNRKWAKEKNKQSQKKKQSGQXTKTVQPQXNKRNANXRYYLSPISLAKSNKLNY

SEQ ID NO: 15190 - protein, 110 aa, Homo sapiens
  misc_feature (1)...(110): Xaa = X or * as defined in Table 2
GLIEILVIYVSDTPVKXDVXSDIFEQXAYGKIDGGNDVCDLQSSEGTNTKMKNNEEMMIGEAMDETGHDGETENEGISTKTSKPDEAETNMLIAEMDTFVCDTVEMSTEG

SEQ ID NO: 15191 - protein, 49 aa, Homo sapiens
  misc_feature (1)...(49): Xaa = X or * as defined in Table 2
MSTPXXXXXXXXXXXXXXXXXXXXXXXXXXXXXXXXXXXXXXXXXXXXS

SEQ ID NO: 15192 - protein, 71 aa, Homo sapiens
  misc_feature (1)...(71): Xaa = X or * as defined in Table 2
MLAGCSRTPELRXSTHCSLPKCWDYRRAHNAQPFLTLNXRSETRRSLXFXIMWLPLEFLGFPLESQQGCTA

SEQ ID NO: 15193 - protein, 55 aa, Homo sapiens
  misc_feature (1)...(55): Xaa = X or * as defined in Table 2
EQPGMVTHTCNPSTLGGRGGWITXDQEFKTSLANMVKPCLCWRYKKLAGHGGACL

SEQ ID NO: 15194 - protein, 119 aa, Homo sapiens
  DOMAIN (22)..(45): PI3 KINASE P85 REGULATORY SUBUNIT SIGNATURE domain identified by eMATRIX, accession number PR00678H, p-value=7.805e-12, raw score of 9.13
  DOMAIN (17)..(69): Src homology domain 2 domain identified by PFam, accession name SH2, E-value=5.5e-05, PFam score of 18.0
  misc_feature (1)...(119): Xaa = X or * as defined in Table 2
VHCLVPDLLQSNNNPCYWGVMDKYAAEALLEGKPEGTFLLRDSAQEDYLFSVSFRRYSRSLHARIEQRNHNFSFDAHDPXVFHSPDITGLLEHYKDPSAXMIFEPLLSTPLIRTFPFCL

SEQ ID NO: 15195 - protein, 74 aa, Homo sapiens
  DOMAIN (33)..(73): kw TRANSCRIPTASE REVERSE II ORF2 domain identified by eMATRIX, accession number DM01354Y, p-value=9.857e-24, raw score of 10.69
  misc_feature (1)...(74): Xaa = X or * as defined in Table 2
LILKFVXNHKIPQIAKTILSKENKAGGITLPDAKISCKAVVTKTALYWHTNRHIEQWNRIANTEINPNICNQLI

SEQ ID NO: 15196 - protein, 102 aa, Homo sapiens
  misc_feature (1)...(102): Xaa = X or * as defined in Table 2
VKAKAKKLQIQPIQLELLYCSYDMQEEDFAHRAMDYFPKIENNLSTRMDHMVSSFCIENWHQLESLSLLILHNMPHYEEDEEFEGLRLDMVQXRLTSCSDAG

SEQ ID NO: 15197 - protein, 130 aa, Homo sapiens
  misc_feature (1)...(130): Xaa = X or * as defined in Table 2
SSLSLSLSSSVSVTFGFGTPFSAVSSSIPDGGLALAFSSSGLSTSFSSPXSHSSSSSPPVPPLSSDTRRSTSPADMAAPSATXTRRSTAPSNPFPSLAAPRREKGGNPPTNERRKLETPIPGRRRQRRQR

SEQ ID NO: 15198 - protein, 114 aa, Homo sapiens
  DOMAIN (51)..(74): SERUM ALBUMIN FAMILY SIGNATURE domain identified by eMATRIX, accession number PR00802G, p-value=2.800e-11, raw score of 14.57
  misc_feature (1)...(114): Xaa = X or * as defined in Table 2
HEHECYAKVLYELKPVGEEPQNVSKQNCDLFEQLGQYEFXNALLVRYTKNVPQGTTPALGQVLRNLRKVSSKCCKHPEAKTMPCAEDYLSVILNQLCALHDRSAVSDRVSRCWT

SEQ ID NO: 15199 - protein, 137 aa, Homo sapiens
  misc_feature (1)...(137): Xaa = X or * as defined in Table 2
RAGYRQKWGSLATVIGQLGLPSGEGLVWPQRRREGHRNAHCSELVLDDLHVITQNRANHRPRCGGSLLSELKFAPLALQPGRQSKTLSQKKNKQTTTKKNTKKQPGSVAHACNPSTLGGXGRQITLPSGVRDQPGQH

SEQ ID NO: 15200 - protein, 109 aa, Homo sapiens
  misc_feature (1)...(109): Xaa = X or * as defined in Table 2
ASDWNQDRARGRGQGGCETRDSSEQSQGTNGQPPAEASKDSWSSGGKMARXAPSPQRQKAGYPGSPSPQPAPASMRSLGPPQFQEPPQALFPLEVPIPSPHTRNKMARA

SEQ ID NO: 15201 - protein, 117 aa, Homo sapiens
  DOMAIN (88)..(107): FANCONI ANAEMIA GROUP A PROTEIN SIGNATURE domain identified by eMATRIX, accession number PR00826D, p-value=5.696e-09, raw score of 6.81
  misc_feature (1)...(117): Xaa = X or * as defined in Table 2
HERAFLLNNSCFLXAFDPYQCDRYLFKIVTDVYYTPYVLIYYIXAPLPLLLQLTHTHFLSLFFLXVLNIYALVYLSTALPLSLFISISSPRYSLCLFFHFLSLMLFLSSLSMYCSHY

SEQ ID NO: 15202 - protein, 89 aa, Homo sapiens
  misc_feature (1)...(89): Xaa = X or * as defined in Table 2
ARVAPLKGVQEQEVRHEGEVTKPEKEKGEETRIENGKLIVVSDSCGRVYVSGKIYYPMXAYNDGLILERYQIMPIDIIVSYVFIMICLD

SEQ ID NO: 15203 - protein, 116 aa, Homo sapiens
  misc_feature (1)...(116): Xaa = X or * as defined in Table 2
KDIRVGHRQNRALPPQASPPTVAPGQPTALPPTGHSGPTMGWPSRLSQLSLITAPTSASPTVVKLPSGACWPLSSTFASSPLSLVQXPXNSDSDHATSAMAPSSESRECLSPWPAR

SEQ ID NO: 15204 - protein, 56 aa, Homo sapiens
  misc_feature (1)...(56): Xaa = X or * as defined in Table 2
EDGHHSGLHSKQQKQPAWPSMVTHTCNPNTLGGRGGWITXGQEFETSLTNMEKPCL

SEQ ID NO: 15205 - protein, 125 aa, Homo sapiens
  misc_feature (1)...(125): Xaa = X or * as defined in Table 2
SHCLEPKDIRVGHRQNRALPPQASPPTVAPGQPTALPPTGHSGPTMGWPSRLYQLSLITAPTSASPTVVKLPSGACWPLSSTFASSPLSLVQXPXNSDSDHATSAMAPSSESRECLSPWPARPRA

SEQ ID NO: 15206 - protein, 67 aa, Homo sapiens
  misc_feature (1)...(67): Xaa = X or * as defined in Table 2
SVTDHPIYNCNLSPSPNPGPSDPSDPVLPFVVMTDYLLPXCVICCCFLSDPPHCSPHPVGGSFFGIN

SEQ ID NO: 15207 - protein, 114 aa, Homo sapiens
  misc_feature (1)...(114): Xaa = X or * as defined in Table 2
NSGRVGSGNLISPLPPGPPGPRPLEEATPVLLSQGIPEREDSFRNLRTDLYIHQLKSXDSPEISSLCQGEEATPRHSDKHNSXNAASEGKGCGFPSPTMEVEIASHDEEDVIHS

SEQ ID NO: 15208 - protein, 60 aa, Homo sapiens
  misc_feature (1)...(60): Xaa = X or * as defined in Table 2
PNRPITGEVTTKNLTKKSLRPDGFTDEFCXTFKEGFIPTLLKTVKEGLHPTFLYEASITL

SEQ ID NO: 15209 - protein, 63 aa, Homo sapiens
  misc_feature (1)...(63): Xaa = X or * as defined in Table 2
RSRLCAPVRESHTYLIMPGLCCXFFLYYIFFGFFFSVVFCLLSFYSPFFSFVSSVSFVXFWVF

SEQ ID NO: 15210 - protein, 117 aa, Homo sapiens
  misc_feature (1)...(117): Xaa = X or * as defined in Table 2
DAWEKKICETEDWLFEIIHQRISSSRMKRNKESLQDVXNTIKRTNIRIIGVIKEKREKGRKLIXEIMAENSPNLGKDMSIQVYEAQRSPYRIHSKKTSPKHMIIKLSKAKSRRXIRG

SEQ ID NO: 15211 - protein, 97 aa, Homo sapiens
  DOMAIN (3)..(28): Mitochondrial energy transfer proteins domain identified by eMATRIX, accession number BL00215A, p-value=2.500e-17, raw score of 15.82
  DOMAIN (3)..(53): Mitochondrial carrier proteins domain identified by PFam, accession name mito_carr, E-value=3e-11, PFam score of 41.5
  misc_feature (1)...(97): Xaa = X or * as defined in Table 2
HMVAGAVAGILEHCVMYPIDCVKTRMQSLQPDPAARYRNVLEALWRIIRTEGLWRPMRGLNVSASCAGSAYALYFACSDXLTQLPAIAMCWRPSGGL

SEQ ID NO: 15212 - protein, 109 aa, Homo sapiens
  misc_feature (1)...(109): Xaa = X or * as defined in Table 2
VASGRRKNLLSKVTGLEVPEGSTPDRPCSGRQSLNPPVTSFPNPSQRNRTPPPTTRQMATLXEALHGSHLPPPGRAERCTSSPGPRTTRPQVSDRRAQSPTSYVGPHRP

SEQ ID NO: 15213 - protein, 118 aa, Homo sapiens
  misc_feature (1)...(118): Xaa = X or * as defined in Table 2
EAGAHTXITMNKQRLLKETVDDTVEVSDFTVSRSNAHEAFNTAFTTLAACAASIGXVLLYLYLTTCPCXCKTKRQNNMLHQSNANSSILRPGPASDASADERNACARKRAVLLEPLKD

SEQ ID NO: 15214 - protein, 87 aa, Homo sapiens
ECWYTRHMPPHPAQCFFYNYAWNLYFFPYRYLHLLDGNENYPCLVDADGDVISFPPITNSEKTKVGWHVCEHGVSSRLFPVELTQVC

SEQ ID NO: 15215 - protein, 59 aa, Homo sapiens
  misc_feature (1)...(59): Xaa = X or * as defined in Table 2
KNVVHTHQGILYSHKKEQDXLGVVAHTCNPSTLGGRGGWITXGQEFETSLTNMVKPCLY

SEQ ID NO: 15216 - protein, 61 aa, Homo sapiens
LFFSEMFFSFKVKKTTSDLFLKVTSATSLQICKDVMDALILVSVGWLLLRNAFEREWCSAP

SEQ ID NO: 15217 - protein, 168 aa, Homo sapiens
LQLEAEEQRKQKKRQSVSGLHRYLHLLDGNENYPCLVDADGDVISFPPITNSEKTKVKKTTSDLFLEVTSATSLQICKDVMDALILKMAEMKKYTLENKEEGSLSDTEADAVSGQLPDPTTNPSAGKDGPSLLVVEQVRVVDLEGSLKVVYPSKADLATAPPHVTVVR

SEQ ID NO: 15218 - protein, 96 aa, Homo sapiens
  misc_feature (1)...(96): Xaa = X or * as defined in Table 2
PILVYRPDVDPXVAKDYASFRNYTXGPLLDRVFTTYXLMHTHQTVDFIRSRHAQFGGFSYGKMTVMEVEDLLDGLMDESDPDLNFLKSFHAXKIAY

SEQ ID NO: 15219 - protein, 436 aa, Homo sapiens
  DOMAIN (91)..(130): PROTEIN ZINC FINGER ZINC-FINGER METAL-BINDING NU domain identified by eMATRIX, accession number PD01066, p-value=1.000e-21, raw score of 19.43
  DOMAIN (141)..(358): Zinc finger, C2H2 type domain identified by PFam, accession name zf-C2H2, E-value=6e-66, PFam score of 232.5
  misc_feature (1)...(436): Xaa = X or * as defined in Table 2
KMLYKNFIMQSQELTALWEAKVHPAMLGLDELGRSGCGHCTQADLRFGDAAGRDPGQDNDRNTAEPAFPPPPRVMAAAAALRAPAQSSVTFEDVAVNFSLEEWSLLNEAQGCLYHDVMLETLTLISSLGKRQTLHTRERPYECIECGKAFAEKSSLINHRKVHSGAKRYECNECGKSFAYTSSLIKHRRIHTGERPYECSECGRSFAENSSLIKHLRVHTGERPYECVECGKSFRRSSSLLQHQRVHTRERPYECSECGKSFSLRSNLIHHQRVHTGERHECGQCGKSFSRKSSLIIHLRVHTGERPYECSDCGKSFAENSSLIKHLRVHTGERPYECIDCGKSFRHSSSFRRHQRVHTGMRPYKXSKFWKFSCPGFLLLQGQRVHTGSRCYECDKWGIFFSXNASFFTXKSAPTEEVPFECNECEKAFSPLSLVT

SEQ ID NO: 15220 - protein, 117 aa, Homo sapiens
  misc_feature (1)...(117): Xaa = X or * as defined in Table 2
NLLYQFWIHTEVINNLGPLELILNTRSHHRVHDGRNRYCIDKNYAGVLIIWDKSFGTFEAENEKVVYGLTHPINTFEPIKVQFHHLFSIWTTFWATPGFFNKFSVIFKGPXWGPGKP

SEQ ID NO: 15221 - protein, 128 aa, Homo sapiens
  DOMAIN (54)..(128): Cadherin cytoplasmic region domain identified by PFam, accession name Cadherin_C_term, E-value=0.00016, PFam score of - 21.7
  misc_feature (1)...(128): Xaa = X or * as defined in Table 2
TVRVCACDHHGNMQSCHAEALIHPAGLSTGALVAILLCIVILLETVVLFAALRRQRKKEPLIISKEDIIDNIVRYNDEGGGEEDTQAIDIRTLMNPVPIXDTHLRRCFAPXTSLYYHRATPTRSCYHP

SEQ ID NO: 15222 - protein, 67 aa, Homo sapiens
  misc_feature (1)...(67): Xaa = X or * as defined in Table 2
YCCTYYIFVLFIPXSSCGLTLIFITCIILFGSISFFLFFTIVFSIIIVTTFKFRLLYSIIFLSYLLC

SEQ ID NO: 15223 - protein, 88 aa, Homo sapiens
  DOMAIN (1)..(82): Cytochrome c oxidase subunit III domain identified by PFam, accession name COX3, E-value=3.7e-07, PFam score of -139.3
  misc_feature (1)...(88): Xaa = X or * as defined in Table 2
VKPSPXPLTGALSALLMTSGLAMXFHFHSITLLILGLLTNTPPVQKGLRYGIILFITSEVFFFAGFFXAFYTPAXAYPQLGGTAQQDT

SEQ ID NO: 15224 - protein, 52 aa, Homo sapiens
  misc_feature (1)...(52): Xaa = X or * as defined in Table 2
GIRHEAYHIVKPSPXPLTGALSALLMTSGLAMXFHFHLKKKKKIGSSFIAVG

SEQ ID NO: 15225 - protein, 88 aa, Homo sapiens
  misc_feature (1)...(88): Xaa = X or * as defined in Table 2
MTSGLSHVDFTSNSITLPHTRAYXTNTLNHIPMMARMLTRRKAHTKGHHTRTCSKKAFRYGDKSYLFTSGSFFSSQGFILEPFLPLQA

SEQ ID NO: 15226 - protein, 26 aa, Homo sapiens
  misc_feature (1)...(26): Xaa = X or * as defined in Table 2
DLFWLFXMDKFLDTYTLPRLNQKEVK

SEQ ID NO: 15227 - protein, 199 aa, Homo sapiens
  misc_feature (1)...(199): Xaa = X or * as defined in Table 2
LKTTHLLFQVSVGQESRCGLAKSSGSKSLTRVKVRGQPRLWCHLKAQLGKDLLLSSLTWLLAACGSSPVVGLWASAPGLLLASHHPRFSATWVFHKVAHNTAAGFMSTGKQEGXRDKITAKQKFASYNLISEVTTHHFLPYSIYEKQVTRSSPHTKERDSPRGXLSEGKDHWEPFQKLPATDVIALFYENKHQTHYIHL

SEQ ID NO: 15228 - protein, 96 aa, Homo sapiens
  misc_feature (1)...(96): Xaa = X or * as defined in Table 2
KSMTDGHIQTVTNIRQLPARTLYTHWPREFSPXSPPLERMHTRGARREARQKAPRIRDKRRGKSRVHCLGEELANGGGWDRIRWGKGERQGDSGRV

SEQ ID NO: 15229 - protein, 118 aa, Homo sapiens
  misc_feature (1)...(118): Xaa = X or * as defined in Table 2
HASAHASGQGDDQLERDHENXDRFVRQVVGINNYRISEESGHPYNIFGKIFHDCADLDTSEHXLCKCDSFDKTLKPTINLVSYNRNFAXTNIDENFRCGKSPSYSSCYSKHEELHNGM

SEQ ID NO: 15230 - protein, 112 aa, Homo sapiens
  misc_feature (1)...(112): Xaa = X or * as defined in Table 2
LSKGTGRKRDLGTLPAHPKAKTDPAAAPQGQPGVGVRSSPPCPGQREQQGSAGSPGWMGGGCPCPVSXPLKGQNQPSPSSLGGSKGSFFSPPDPAVARGRRVRGEERGQVRE

SEQ ID NO: 15231 - protein, 230 aa, Homo sapiens
  misc_feature (1)...(230): Xaa = X or * as defined in Table 2
LTAEACLSFPSPLPSSLGVSGCPHHGGLGPAHPSALPQPPGCIFEAAWPPRALTXPLSSPLTPPAPGHCRIRRGEEGASAAFPGCLGTGLVLSFEDDHRLQDXGQAHTQSQPGASPQTLCCFRGLGHAGELLTPTPTVQPGLFPESASKWPQLFGPRILPGPPKGSPTTKAWPPGVCGQQLPLVKGHPGXPSPASGRSRCEVSVPSCPVVLPLGWGCLAPAGCRSQHWRD

SEQ ID NO: 15232 - protein, 78 aa, Homo sapiens
  misc_feature (1)...(78): Xaa = X or * as defined in Table 2
FHCFISNFXVANRSSLLLIDFSVGLLKCKSFIFFNNAILHYCLMMVCEYDSLFLSYMFLLIFFYFYYIFIYLLFIHPY

SEQ ID NO: 15233 - protein, 87 aa, Homo sapiens
  DOMAIN (1)..(60): Cathelicidins domain identified by PFam, accession name Cathelicidins, E-value=4.4e-05, PFam score of 30.3
  misc_feature (1)...(87): Xaa = X or * as defined in Table 2
VLNSIXSGNQGKSYANVYRLLYLDPIPKIYAEAYTPXNVNSTNLETKSPKTIQKFPEDREFKNDFFEKTKNGDRETGAFHPFLLFLV

SEQ ID NO: 15234 - protein, 795 aa, Homo sapiens
GETGMSTALTHTTVAMRCPMLGGGGGPTYGPPQPWGHPDVHIMQHHVLPIQARLGSIAEIDLGVPPPVMKTFKEFLLSLDDSVDETEAVKRYNDYKLDFRRQQMQDFFLAHKDEEWFRSKYHPDEVGKRRQEARGALQNRLRVFLSLMETGWFDNLLLDIDKADAIVKMLDAAVIKMEGGTENDLRILEQEEEEEQAGKPGEPSKKEEGRAGAGLGDGERKTNDKDEKKEDGKQAENDSSNDDKTKKSEGDGDKEEKKEDSEKEAKKSSKKRNRKHSGDDSFDEGSVSESESESESGQAEEEKEEAEALKEKEKPKEEEWEKPKDAAGLECKPRPLHKTCSLFMRNIAPNISRAEIISLCKRYPGFMRVALSEPQPERRFFRRGWVTFDRSVNIKEICWNLQNIRLRECELSPGVNWDLTRRVRNINGITQHKQIVRNDIKLAAKLIHTLDDRTQLWASEPGTPPLPTSLPSQNPILKNITDYLIEEVSAEEEELLGSSGGAPPEEPPKEGNPAEINVERDEKLIKVLDKLLLYLRIVHSLDYYNTCEYPNEDEMPNRCGIIHVRGPMPPNRISHGEVLEWQKTFEEKLTPLLSVRESLSEEEAQKMGRKDPEQEVEKFVTSNTQELGKDKWLCPLSGKKFKGPEFARKHIFNKHAEKIEEVRKEVAFFNNFLTDAKRPALPEIKPAQPPGPAQILPPGLTPGLPYPHQTPQGLMPYGQPRPPILGYGAGAVRPAVPTGGPPYPHAPYGAGRGNYDAFRGQGGYPGKPRNRMVRGDPRAIVEYRDLDAPDDVDFF

SEQ ID NO: 15235 - protein, 822 aa, Homo sapiens
GETGMSTALTHTTVAMRCPMLGGGGGPTYGPPQPWGHPDVHIMQHHVLPIQARLGSIAEIDLGVPPPVMKTFKEFLLSLDDSVDETEAVKRYNDYKLDFRRQQMQDFFLAHKDEEWFRSKYHPDEVGKRRQEARGALQNRLRVFLSLMETGWFDNLLLDIDKADAIVKMLDAAVIKMEGGTENDLRILEQEEEEEQAGKPGEPSKKEEGRAGAGLGDGERKTNDKDEKKEDGKQAENDSSNDDKTKKSEGDGDKEEKKEDSEKEAKKSSKKRNRKHSGDDSFDEGSVSESESESESGQAEEEKEEAEEALKEKEKPKEEEWEKPKDAAGLECKPRPLHKTCSLFMRNIAPNISRAEIISLCKRYPGFMRVALSEPQPERRFFRRGWVTFDRSVNIKEICWNLQNIRGARSLINRWCSRGKGLRAAVSLASGLRECELSPGVNRDLTRRVRNINGITQHKQIVRNDIKLAAKLIHTLDDRTQLWASEPGTPPLPTSLPSQNPILKNITDYLIEEVSAEEEELLGSSGGAPPEEPPKEGNPAEINVERDEKLIKVLDKLLLYLRIVHSLDYYNTCEYPNEDEMPNRCGIIHVRGPMPPNRISHGEVLEWQKTFEEKLTPLLSVRESLSEEEAQKMGRKDPEQEVEKFVTSNTQELGKDKWLCPLSGKKFKGPEFVRKHIFNKHAEKIEEVKKEVAFFNNFLTDAKRPALPEIKPAQPPGPAQIIHVPVRVVLPPGLTPGLPYPHQTPQGLMPYGQPRPPILGYGVPTGGPPYPHAPYGAGRGNYDAFRGQGGYPGKPRNRMVRGDPRAIVEYRDLDAPDDVDFF

SEQ ID NO: 15236 - protein, 59 aa, Homo sapiens
  misc_feature (1)...(59): Xaa = X or * as defined in Table 2
MAVNCSEMRLKSSWNGCAIANEGDCHLEATSICSSTSFMDMLGEFRHCESSILLASTAX

SEQ ID NO: 15237 - protein, 140 aa, Homo sapiens; identical to SEQ ID NO: 8052
  DOMAIN (87)..(99): Globins profile domain identified by eMATRIX, accession number BL01033B, p-value=7.000e-14, raw score of 13.81
  DOMAIN (14)..(140): Globin domain identified by PFam, accession name globin, E- value=1.3e-37, PFam score of 135.6

SEQ ID NO: 15238 - protein, 470 aa, Homo sapiens
  DOMAIN (53)..(108): Tubulin subunits alpha beta, and gamma proteins. domain identified by eMATRIX, accession number BL00227B, p-value=1.000e- 40, raw score of 19.29
  DOMAIN (4)..(358): Tubulin/FtsZ family domain identified by PFam, accession name tubulin, E-value=1.2e-161, PFam score of 550.4
  misc_feature (1)...(470): Xaa = X or * as defined in Table 2
ILTMREIVHIQAGQCGNQIGAKFWEVISDEHGIDPTGTYHGDSDLQLDRISVYYNEATGGKYVPRAILVDLEPGTMDSVRSGPFGQIFRPDNFVFGQSGAGNNWAKGHYTEGAELVDSVLDVVRKEAESCDCLQGFQLTHSLGGGTGSPGMGTLLISKIREEYPDRIMNTFSVVPSPKVSDTVVEPYNATLSVHQLVENTDETYCIDNEALYDICFRTLKLTTPTYGDLNHLVSATMSGVTTCLRFPGQLNADLRKLVSVNMVPFPRLHFFMPGFAPLHQPVESQQYRGSHKCRELTQQVSFDAKEHXWAACGPPATGRYLTVAAAFRGRMSMKEVDEQMLNVQNKNXQLTLWEWFPQQCSRTACLFTSQPRGPSRWAVHLSLGNRHSHSRELFQSGIFGSSFTWPCFRRKAFLFHWYTQGEGHGTEMGVSTEGXEATLNDLRLXSIKQLPRMPTQEEEEDFGEEAEEEA

SEQ ID NO: 15239 - protein, 100 aa, Homo sapiens
  DOMAIN (17)..(29): TYPE II EGF-LIKE SIGNATURE domain identified by eMATRIX, accession number PR00010A, p-value=7.677e-10, raw score of 11.79
  DOMAIN (21)..(52): EGF-like domain identified by PFam, accession name EGF, E- value=5e-10, PFam score of 46.7
  misc_feature (1)...(100): Xaa = X or * as defined in Table 2
ARGLCPLGYTGLKCETDIDECSPLPCLNNGVCKDLVGEFICECPSGYTGQRCEENINECSSSPWLNKGICVDGVVCYCCTFVXGFCIFKFSCSSCPLYTI

SEQ ID NO: 15240 - protein, 115 aa, Homo sapiens
  misc_feature (1)...(115): Xaa = X or * as defined in Table 2
GTSGTSRFLXDVLQMNDFGTRWRFYATVIYQKPQLKSLLILEXRETWVLGTDGTLQTKEEKDPRLRKTLLVYVAPLLVLGSDVLEALSGAAPLRLFLKDAIRDQARIGRAERTVL

SEQ ID NO: 15241 - protein, 113 aa, Homo sapiens
  misc_feature (1)...(113): Xaa = X or * as defined in Table 2
VRSAYPRRLENSLAGQRRHHLCHPLLPPAGGARAPQPQPQPQLLGARPGPGRCRMRRRPQAPRAGRGAALARALXPLSSTASRRGACPGAAPSDSPEDPASDHGHSPRLGGRC

SEQ ID NO: 15242 - protein, 112 aa, Homo sapiens
  misc_feature (1)...(112): Xaa = X or * as defined in Table 2
QIDEIVTETLLTEAERGAKVYLTTGYFNLTQAYMDLVLGTRAEYQILLASPEVNGFFGAKGVAGAIPAAYVHIERQFFNDECSLXQSRAVQLSEYWRCSGRSLSMEFVRHDI

SEQ ID NO: 15243 - protein, 62 aa, Homo sapiens
WQFTFTFSKSIKKDSKEEIYCQLPRDTKIEDFGTGPRSRYPLVALLTLSDEDDREIMYYFHG

SEQ ID NO: 15244 - protein, 419 aa, Homo sapiens
  misc_feature (1)...(419): Xaa = X or * as defined in Table 2
VRCRPVRNSRVDPRVRMAAVFLVTLYEYSPLFYIAVVFTCFIVTTGLVLGWFGWDVPVILRNSEETQFSTRVFKKQMRQVKNPFGLEITNPSSASITTGITLTTDCLEDSLLTCYWGCSVQKLYEALQKHVYCFRISTPQALEDALYSEYLYQEQYFILSSDIPISTENXTSYGXSVANLLIILGILEACLLLQNKHSPCIRTCSVYRISVSGTGFACFRLIYPLALIIRLLMDKVPLTYXSFLGYXKHVYCFRISTPQALEDALWSEYLYQEQHFIKKDSKEEIYCQLPRDTNIDDFGTVPRSRYPLVALLTLSDEDDREIYDIISMVSVIHIPDRTYKLSCRILYQYLLLAQGQFHDLKQLFMSANNNFTPSNNSSSEEKNTDRSLLEKVGLSESEVEPSEENSKDCVVCQNGTVNW

SEQ ID NO: 15245 - protein, 94 aa, Homo sapiens
  DOMAIN (31)..(55): TRANSMEMBRANE FOUR FAMILY SIGNATURE domain identified by eMATRIX, accession number PR00259A, p-value=2.742e-21, raw score of 9.27
  DOMAIN (30)..(93): Transmembrane 4 family domain identified by PFam, accession name transmembrane4, E-value=3.7e-36, PFam score of 118.6
RWACSAEQKAEPAGSSRTGGMGSACIKVTKYFLFLFNLIFFILGAVILGFGVWILADKSSFISVLQTSSSSLRMGAYVFIGVGAVTMLMGFLGW

SEQ ID NO: 15246 - protein, 255 aa, Homo sapiens
  DOMAIN (117)..(144): TRANSMEMBRANE FOUR FAMILY SIGNATURE domain identified by eMATRIX, accession number PR00259B, p-value=6.727e-23, raw score of 14.81
  DOMAIN (75)..(255): Transmembrane 4 family domain identified by PFam, accession name transmembrane4, E-value=3.9e-111, PFam score of 358.4
AVEFGLCSPTPTEARAGDAGPAARSRKQNPQSPPCCCVDDTWAQAEVGPVTSCTGFVEGSSRTGGMGSACIKVTKYFLFLFNLIFFILGAVILGFGVWILADKSSFISVLQTSSSSLRMGAYVFIGVGAVTMLMGFLGCIGAVNEVRCLLGLYFAFLLLILIAQVTAGALFYFNMGKLKQEMGGIVTELIRDYNSSREDSLQDAWDYVQAQVKCCGWVSFYNWTDNAELMNRPEVTYPCSCEVKGEEDNSLSVRK

SEQ ID NO: 15247 - protein, 90 aa, Homo sapiens
  misc_feature (1)...(90): Xaa = X or * as defined in Table 2
CGTDKTFFWSCTVRENLNSYSEELLSRRQICKNKNDPPGDRDXFDYSRSDYEHSRRGRSYDSSMESRNRDREKRRERERDTDRKRSRKSP

SEQ ID NO: 15248 - protein, 154 aa, Homo sapiens
  DOMAIN (26)..(48): Globins profile domain identified by eMATRIX, accession number BL01033A, p-value=3.250e-20, raw score of 16.94
  DOMAIN (2)..(131): Globin domain identified by PFam, accession name globin, E- value=4.5e-50, PFam score of 179.0
MVLSPADKTNVKAAWGKVGAHAGEYGAEALERMFLSFPTTKTYFPHFDLSHGSAQVKGHGKKVADALTNAVAHVDDMPNALSALSDLHAHKLRVDPVNFKLLSHCLLVTLAAHLPAEFTPAVHASLDKFLASTQREPTMVLVSCRQDQRQGRLG

SEQ ID NO: 15249 - protein, 148 aa, Homo sapiens
  DOMAIN (42)..(69): DEAD/DEAH box helicase domain identified by PFam, accession name DEAD, E-value=0.00036, PFam score of 16.0
GQDSRSRDNGPDGMEPEGVIESNWNEIVDSFDDMNLSESLLRGIYAYGFEKPSAIQQRAILPCIKGYDCDLYETLTITQAVIFINTRRKVDWLTEKMHARDFTVSAMHGDMDQKERDVIMREFRSGSSRVLITTDLLARGIDVQQVSL

SEQ ID NO: 15250 - protein, 120 aa, Homo sapiens; identical to SEQ ID NO: 8610
  DOMAIN (27)..(82): Helicases conserved C-terminal domain identified by PFam, accession name helicase_C, E-value=0.0019, PFam score of 19.5
  misc_feature (1)...(120): Xaa = X or * as defined in Table 2

SEQ ID NO: 15251 - protein, 148 aa, Homo sapiens
  misc_feature (1)...(148): Xaa = X or * as defined in Table 2
NLQEWKLDTLCDLYETLTITQAVIFINTRRKVDWLTEKMHARDFTVSAMVCLPAASLLWVCPSEVSYLKPGFLEPRCLPGLLHICFLFQHGDMDQKERDVIMREFRSGSSRVLITTDLLVSRGNXXQRQKGGSKVIPSPRGHQCLSGK

SEQ ID NO: 15252 - protein, 99 aa, Homo sapiens
  DOMAIN (17)..(41): DEAD-box subfamily ATP-dependent helicases proteins domain identified by eMATRIX, accession number BL00039C, p-value=6.250e- 25, raw score of 15.63
  DOMAIN (15)..(90): DEAD/DEAH box helicase domain identified by PFam, accession name DEAD, E-value=1.1e-17, PFam score of 58.8
SYAIYWLFFSSLAPKYIKMFVLDEADEMLSRGFKDQIYDIFQKLNSNTQVVLLSATMPSDVLEVTKKFMRDPIRILVKKEEVTLEGIRQFYINVEREEW

SEQ ID NO: 15253 - protein, 122 aa, Homo sapiens
  misc_feature (1)...(122): Xaa = X or * as defined in Table 2
AEIRDRSPCGELHVEREEWKLDTLCDLYETLTITQAVIFINTRRKVDWLTEKMHARDFTVSAMHGDMDQKERDVIMREFRSGSSRVLITTDLLVSRGNXXQRQKGGSKVIPSPRGHQCLSGK

SEQ ID NO: 15254 - protein, 420 aa, Homo sapiens
  DOMAIN (55)..(94): DEAD-box subfamily ATP-dependent helicases proteins domain identified by eMATRIX, accession number BL00039A, p-value=6.824e- 33, raw score of 18.44
  DOMAIN (49)..(247): DEAD/DEAH box helicase domain identified by PFam, accession name DEAD, E-value=9e-53, PFam score of 169.8
  misc_feature (1)...(420): Xaa = X or * as defined in Table 2
FLRIMSASQDSRSRDNGPDGMEPEGVIESNWNEIVDSFDDMNLSESLLRGIYAYGFEKPSAIQQRAILPCIKGYDVIAQAQSGTGKTATFAISILQQIELDLKATQALVLAPTRELAQQIQKVVMALGDYMGASCHACIGGTNVRAEVQKLQMEAPHIIVGTPGRVFDMLYRRYLAPKSIRMLVLNEADEMLSRGFKDQIYDIFQKLNSNTQVVLLSATMPFDVLEVTKKFMRGPIRILVKKEELTLEGIRQFLHQPWNEEEWKLDTXCDLYETLTITQAVIFINTRRKVWDWPHPRKMHARDFTVSRHAMGDMGPKGNETVIMEGSFRSGSXQSFXLPTXPCWARGIDVPARFSLVINYDLPTNRENYIHRIGSTVDRFGRKGVAINMVTEEDKRALRTLGASYNTSIEEMPLNVADLI

SEQ ID NO: 15255 - protein, 125 aa, Homo sapiens
  misc_feature (1)...(125): Xaa = X or * as defined in Table 2
MDTTPLSYSESXSDEYLVTNMXLQDAFCRGLVKPGLNVLLKGPINAVIDVNGLKQCLAXFKRYLECLXRLDVTLCPVPXIGGSDAPLPHNKDHKAADPXDYFQRXMSFYRQAHAAMLAVLPRLHH

SEQ ID NO: 15256 - protein, 132 aa, Homo sapiens
  misc_feature (1)...(132): Xaa = X or * as defined in Table 2
RESESCAAADTPALETLSFHGDWEIIEVFNRDLGSTYPDDLALXMEDVDFEEEYEEXGYDXGWVLYPQEGVIGNMEGPDYSXVTFALHSSSVYRVSLDPKTYTLAVTGGYDDGAFVWLLTYGXLLFEXASHE

SEQ ID NO: 15257 - protein, 132 aa, Homo sapiens
  misc_feature (1)...(132): Xaa = X or * as defined in Table 2
NSQVLLDSPIQLSKITENYECITELSGLLKREQSSTVNASNLENDEARLKAYLENRSEIDSLKTSNPIDLXEASISQAGSINXSRFXSSGMNKSYDVRIDNFNGSIGDRILLTAANVILAWCRLYGLMRQNV

SEQ ID NO: 15258 - protein, 141 aa, Homo sapiens
  misc_feature (1)...(141): Xaa = X or * as defined in Table 2
PVLRVARERSLPGPQEGPHGRASESASPLAPSIAPSPPGPPALSASHIMGSQALRSPETPWXSPWDPPAPLDLVSPWQFPPGPHASATPXRSPLGLQTPQAPGSWAPHVPATPQASGLPAPHVTETPXASSXLAMPVPETP

SEQ ID NO: 15259 - protein, 143 aa, Homo sapiens; identical to SEQ ID NO: 8541
  DOMAIN (21)..(43): Globins profile domain identified by eMATRIX, accession number BL01033A, p-value=2.929e-17, raw score of 16.94
  DOMAIN (10)..(143): Globin domain identified by PFam, accession name globin, E- value=4.3e-55, PFam score of 196.4

SEQ ID NO: 15260 - protein, 51 aa, Homo sapiens
  misc_feature (1)...(51): Xaa = X or * as defined in Table 2
LFSLACRYHVYPTCRNTSGILGFTVSVVTNAIPFISXLSSFYYIYFLYNFG

SEQ ID NO: 15261 - protein, 126 aa, Homo sapiens
  misc_feature (1)...(126): Xaa = X or * as defined in Table 2
FGCLLQGRRPLKSHSPWQGPGASGRPAQGKHKNRXRGQNPSNLSHPAPTPPWPGIKCPLPRAGPSLSSLLPGRVLCARPEFPLHGRGLEPSASLLPSALAPSPLRGLKGTERSRLKADQAWGGWKE

SEQ ID NO: 15262 - protein, 33 aa, Homo sapiens
  misc_feature (1)...(33): Xaa = X or * as defined in Table 2
NKILIIKTNSRKKXKIEXXRDNNQSNNNKNHNK

SEQ ID NO: 15263 - protein, 131 aa, Homo sapiens
  DOMAIN (79)..(112): LacY family proton/sugar symporters proteins domain identified by eMATRIX, accession number BL00896A, p-value=6.690e- 09, raw score of 14.92
  misc_feature (1)...(131): Xaa = X or * as defined in Table 2
NFLYTFLYFPNFVXSAHCFXNQKKKNKYFLLREKCLLNCFPHLYVAFYVYIPSIFNLSGCXYLPSCSIFYVFIPLSHPLLFFFLCFSLSFSLPFFLSLFCFPFLAFLFHPSFILLLDSSACLLCISCFFHL

SEQ ID NO: 15264 - protein, 49 aa, Homo sapiens
  DOMAIN (10)..(42): Elongation factor Tu family domain identified by PFam, accession name GTP_EFTU, E-value=1.4e-07, PFam score of 28.2
DGKGLLQVCLPLQDVYKIGGIGTVPVGRVETGVLKPGMVVNFAPVNVTT

SEQ ID NO: 15265 - protein, 228 aa, Homo sapiens
  DOMAIN (47)..(57): GTP-BINDING ELONGATION FACTOR SIGNATURE domain identified by eMATRIX, accession number PR00315E, p-value=3.864e-09, raw score of 12.29
  DOMAIN (9)..(136): Elongation factor Tu family domain identified by PFam, accession name GTP_EFTU, E-value=0.0012, PFam score of 15.0
  misc_feature (1)...(228): Xaa = X or * as defined in Table 2
LQGHLRLTGAVLIVAAGVGEFESWYSPRMGRPESMPFLAYTLGVKRLIVGVNKMDSSXPPYSQKRYEEIVKEGSTYIKKIGYNPDTVAFVPISGWNGDNMLEPSANMPWFKGWKVTRKDGNASGTTLLEALDCILPPTRPTXQSPCGLPSSRDVYKIGGILGTVPVGPSGRLGVLKPGMGGSPLAPVNVTTEVKICSEMHHGRFXVEALSWGDNVGLSMFQGLLFCSK

SEQ ID NO: 15266 - protein, 138 aa, Homo sapiens
  misc_feature (1)...(138): Xaa = X or * as defined in Table 2
SVGDPCPSTASVDQCTIVPXPMEGPLLLYRRCIEGVGGIFLWDPQPSSPQHPGATPSTGEPGFPVVHQDLSHIQQPAAVVAALNNHKPPVRSXPPSATPEAFTXFSKCDDLDEELSLLRYCHAFSECXHDIRPSHIHP

SEQ ID NO: 15267 - protein, 120 aa, Homo sapiens
  misc_feature (1)...(120): Xaa = X or * as defined in Table 2
TERFGMXGGEAVCLYEEPVSELLRRCGNCTRESWVVSFYLSADHELLSPTNYHFLSSPKEAGGLCKAQITAIIFQQGDIFVFDLETSAVRPFVWWQVEAIPVDYLPCSFVMIIPTLYCSP

SEQ ID NO: 15268 - protein, 75 aa, Homo sapiens
  misc_feature (1)...(75): Xaa = X or * as defined in Table 2
WEGGGSGTILARRFWDLQAYRPHAQVPGFLRXSHLMAVGHAEATDLTALTMLILTPEAWQLHTILYLSGLLAMLP

SEQ ID NO: 15269 - protein, 87 aa, Homo sapiens
  misc_feature (1)...(87): Xaa = X or * as defined in Table 2
YWLFYDFMIAEKILNGYFCCCCXDRSCPVAQAGELWHERGSLQPRPPGVKQCSYFSLLSSWDRRHVPPHLANFXTFFCRDRVSPVLP

SEQ ID NO: 15270 - protein, 146 aa, Homo sapiens
  DOMAIN (31)..(53): Globins profile domain identified by eMATRIX, accession number BL01033A, p-value=2.929e-17, raw score of 16.94
  DOMAIN (10)..(85): Globin domain identified by PFam, accession name globin, E- value=2.4e-08, PFam score of 33.5
  misc_feature (1)...(146): Xaa = X or * as defined in Table 2
APSPDAMGHFTEEDKATITSLWGKVNVEDAGGETLGRLLVVYPWTQRFFDSFGNLSSASAIMGNPKVKAHGKKVLTSLGRCHKSTWDDLKGTFAQPDVNCTCDKLHVDPENFKLLGKCCWXPVFGNPIFGKEFTPEGAELPGQKDG

SEQ ID NO: 15271 - protein, 1106 aa, Homo sapiens
  DOMAIN (265)..(293): Granins proteins domain identified by eMATRIX, accession number BL00422C, p-value=8.085e-10, raw score of 16.18
GSLPCLEHVSLLNNPLSIIPDYRTKVLAQFGERASEVCLDDTVTTEKELDTVEVLKAIQKAKEVKSKLSNPEKKGGEDSRLSAAPCIRPSSSPPTVAPASASLPQPILSNQGIMFVQEEALASSLSSTDSLTPEHQPIAQGCSDSLESIPAGQAASDDLRDVPGAVGGASPEHAEPEVQVVPGSGQIIFLPFTCIGYTATNQDFIQRLSTLIRQAIERQLPAWIEAANQREEGQGEQGEEEDEEEEEEEDVAENRYFEMGPPDVEEEEGGGQGEEEEEEEEDEEAEEERLALEWALGADEDFLLEHIRILKVLWCFLIHVQGSIRQFAACLVLTDFGIAVFEIPHQESRGSSQHILSSLRFVFCFPHGDLTEFGFLMPELCLVLKVRHSENTLFIISDAANLHEFHADLRSCFAPQHMAMLCSPILYGSHTSLQEFLRQLLTFYKVAGGCQERSQGCFPVYLVYSDKRMVQTAAGDYSGNIEWASCTLCSAVRRSCCAPSEAVKSAAIPYWLLLTPQHLNVIKADFNPMPNRGTHNCRNRNSFKLSRVPLSTVLLDPTRSCTQPRGAFADGHVLELLVGYRFVTAIFVLPHEKFHFLRVYNQLRASLQDLKTVVIAKTPGTGGSPQGSFADGQPAERRASNDQRPQEVPAEALAPAPVEVPAPAPAAASASGPAKTPAPAEASTSALVPEETPVEAPAPPPAEAPAQYPSEHLIQATSEENQIPSHLPACPSLRHVASLRGSAIIELFHSSIAEVENEELRHLMWSSVVFYQTPGLEVTACVLLSTKAVYFVLHDGLRRYFSEPLQDFWHQKNTDYNNSPFHISQCFVLKLSDLQSVNVGLFDQHFRLTGSTPMQVVTCLTRDSYLTHCFLQHLMVVLSSLERTPSPEPVDKDFYSEFGNKTTGKMENYELIHSSRVKFTYPSEEEIGDLTFTVAQKMAEPEKAPALSILLYVQAFQVGMPPPGCCRGPLRPKTLLLTSSEIFLLDEDCVHYPLPEFAKEPPQRDRYRLDDGRRVRDLDRVLMGYQTYPQALTLVFDDVQGHDLMGSVTLDHFGEVPGGPARASQGREVQWQVFVPSAESREKLISLLARQWEALCGRELPVELTG

SEQ ID NO: 15272 - protein, 95 aa, Homo sapiens
  misc_feature (1)...(95): Xaa = X or * as defined in Table 2
SPPTVVPASASLPQPILSNQGILGDEXVILVSXACLLARPARKRGGCAVPSGAEARDTQERTPPARAPGDAELGVRSWENSSTRCFKSQKNIPTP

SEQ ID NO: 15273 - protein, 138 aa, Homo sapiens
  misc_feature (1)...(138): Xaa = X or * as defined in Table 2
PPPLWFNQDPHVESKGLAAGRPVPSTSQGRTQFRGSAPPPKDPLPRTGPSANRRVPHTFQPDISFPGSPKPPSXDRPHPNPSLRSPLVSHSVHNQAGRWAKVQATARERKSDTKSIWLWRWRRILKRTRSNSLYTLHG

SEQ ID NO: 15274 - protein, 78 aa, Homo sapiens
  misc_feature (1)...(78): Xaa = X or * as defined in Table 2
KKSNLRMLAEHGGSHLXSQLCRRLRQENHLISGGGGCSESTSHHCTPAWGTEXDFVSEKKKKKLTGWPDPSGRIKWWC

SEQ ID NO: 15275 - protein, 83 aa, Homo sapiens
  misc_feature (1)...(83): Xaa = X or * as defined in Table 2
LECNGTISAHCNLRLMVSGXFSRLSLPSSXDYRRPRLRPANFCILVEMGFHHVGQAGLKLQTSGDLPLSLPKCWDYRRAHPLA

SEQ ID NO: 15276 - protein, 61 aa, Homo sapiens
  misc_feature (1)...(61): Xaa = X or * as defined in Table 2
RQSLALSPRLECSGAIIAHCSLEPLGLRQLCCLSLPKCXDYRHEPLSLACLFLFYPPEHLT

SEQ ID NO: 15277 - protein, 60 aa, Homo sapiens
  misc_feature (1)...(60): Xaa = X or * as defined in Table 2
KLVGLEPVSTYSIRVSAFTIVGNGNQFSNVVKFTTQESGXIQFLSLKCFFLYLTPFFSFS

SEQ ID NO: 15278 - protein, 108 aa, Homo sapiens
  misc_feature (1)...(108): Xaa = X or * as defined in Table 2
AGEGGLQALILRDGAWPQPPSGDXQVKGLEPLTPAPAGSSQGPGPGPPIASSPVGQSKTDTATTTKVGPVGGGQPAPMHQQLPPSPGDPAAEDAHTWGERSLSGMKGK

SEQ ID NO: 15279 - protein, 98 aa, Homo sapiens
  misc_feature (1)...(98): Xaa = X or * as defined in Table 2
HWKERGSLYPAXTQGSACVLPGQGHLPRPQATPPTTAHLVPPQHCRRPGPAAPAPXQGMSTPTTATLFSRLQGRLQLPMGAPSGQGPWLYCRGEGPRA

SEQ ID NO: 15280 - protein, 41 aa, Homo sapiens
MNSPDWELWQDNSPQDSCVLIPRTCDHAASRGRRDSSGVIE

SEQ ID NO: 15281 - protein, 162 aa, Homo sapiens
  DOMAIN (37)..(81): Aromatic amino acids permeases proteins domain identified by eMATRIX, accession number BL00594A, p-value=9.376e-09, raw score of 16.75
  misc_feature (1)...(162): Xaa = X or * as defined in Table 2
IASLFLIVKVEEVSQTAIWKKKKCDEYIPGTTSLGMSVFNLSNAIMGSGILGLAFALANTGILLFLVLLTSVTLLSIYSINLLLICSKETGCMVYEKLGEQVFGPQGKFVIFGATSLQNTGGKKNMLFFTXLEYTHHTSFFSKWLFVRLLLLSRSEINLLFI

SEQ ID NO: 15282 - protein, 49 aa, Homo sapiens
MMDRLAVSCTLRNWAFSATTANTNPIYNVTLLGLVAQSARFIRPGGVQL

SEQ ID NO: 15283 - protein, 72 aa, Homo sapiens
  misc_feature (1)...(72): Xaa = X or * as defined in Table 2
SFALVAQAGVQWHDLGSLQPLPPRFKXFSHLSLPSSWDFRCPEPYWLIFVFLVETGFHHVDQAGLELLTSGD

SEQ ID NO: 15284 - protein, 102 aa, Homo sapiens
  misc_feature (1)...(102): Xaa = X or * as defined in Table 2
RSGGGVPPRNPPPLGGRGGGFPQGPGFQITLSPKGKPLFFLKSQNFPGXWAPPLKPPFKGGXTKKIFLTLEGGVPINGNFPPPPPPGGKNFFSKKKKKKKKK

SEQ ID NO: 15285 - protein, 125 aa, Homo sapiens
  misc_feature (1)...(125): Xaa = X or * as defined in Table 2
GGTIYGNCVVPATVPAGSPGVPAVGGQPGPLPVLXRTSPETCPPLGVTTGSLCLAPYHSLSFGGHGLPGTPREAGXREGGNSLQLQLPNPKPFLPSRPEDPTWSPSSQGEELRRRKVRCDLKSLT

SEQ ID NO: 15286 - protein, 200 aa, Homo sapiens
  DOMAIN (26)..(41): PHD-finger domain identified by eMATRIX, accession number PF00628, p-value=7.097e-09, raw score of 15.84
  DOMAIN (10)..(62): PHD-finger domain identified by PFam, accession name PHD, E- value=0.00063, PFam score of 19.5
SHKTNVQQCYCYCGGPGDWYLKMLQCCKCKQWFHEACVQCLQKPMLFGDRFYTFICSVCSSGPDYLKRLPLQWVDIAHLCLYNLSVIHKKKYFDSELELMTYINENWDRLHPGELADTPKSERYEHVLEALNDYKTMFMSGKEIKKKKHLFGLRIRVPPVPPNVAFKAEKEPEGTSHEFKLKGRKASKPISDSREVSNGI

SEQ ID NO: 15287 - protein, 56 aa, Homo sapiens
  misc_feature (1)...(56): Xaa = X or * as defined in Table 2
CVKLFLDTSQLADTPKSERYEHVLEALNDYKTMXVDLFYVSLXGRHLVSIRNNGIV

SEQ ID NO: 15288 - protein, 249 aa, Homo sapiens
  misc_feature (1)...(249): Xaa = X or * as defined in Table 2
SHFIYFLTIWISSLVNEVCXSSPIFLMNLQVVLYIFWLLLLYELCCRIFSHFVVCLFTMFINIVTFXFXYLQIIVFLYGXLGFFYGYVKNIVNILLLHALXFCLSHFGFIPLGTIFNIXYEVIFLLLXGXSVVPALFIEKKQKQKTFLFLLLXSAFSVVYWQYMQRSFMGSLLYWFFSCANVHSLHYFMIFKKIFDIXYQSPFTSLLFINSLWLFLVLCSSLYILEIAYHVSLKKAEHIENLIGVAMNL

SEQ ID NO: 15289 - protein, 129 aa, Homo sapiens
  misc_feature (1)...(129): Xaa = X or * as defined in Table 2
KGGATCPESPQDRKRRGNLDMEKLYSENEGMASNHGKMENEXQPQDQRKPQVTLYSGRQEVRKRGKDRKQGQNRRXGNVXRIKGKPESEGEAKEGKSEREGESEMEGGSEREGKPEIEGKPESEGEPLE

SEQ ID NO: 15290 - protein, 137 aa, Homo sapiens
  DOMAIN (1)..(137): Cation efflux family domain identified by PFam, accession name Cation_efflux, E-value=0.022, PFam score of -27.0
  misc_feature (1)...(137): Xaa = X or * as defined in Table 2
VTGVLVYLAVERLISGDYEIDGGTMLSTSGCAEAENIIMGXTLHQSGHGHSHGTTNQXEENPSVRAVFIHVIGDFMQSMGVLVAAYILYFKPEYKYVDPICTFVFSILRLGTTLTILRDVILVLMEGTPQGVYFTAV

SEQ ID NO: 15291 - protein, 103 aa, Homo sapiens
  misc_feature (1)...(103): Xaa = X or * as defined in Table 2
LESLSHKRSSPRHIVIRLSKAKTKKSVLRAVRQKYQITYKRTPISLSVDCSAQTLQARRDLGPTFCLLKENNNQPIILYPVKXSFINEGKIVFFREISPERIC

SEQ ID NO: 15292 - protein, 150 aa, Homo sapiens
  DOMAIN (75)..(114): Ribosomal protein L15e proteins domain identified by eMATRIX, accession number BL01194D, p-value=5.000e-27, raw score of 19.02
  DOMAIN (6)..(126): Ribosomal L15 domain identified by PFam, accession name Ribosomal_L15e, E-value=2.7e-31, PFam score of 117.4
LPAPPGRIKRADLATRPSKVIRVRRGGRKRPVPKGATLRKPVHHGVNQLKFARSLQSVAEERAGRHCGALRVLNSYWVGEDSTYQWITKPVHKHREMRGLTSAGRKSRGLGKGHKFHHTIGCLAGQLGEGAILSSSTVTANISKVCKIHT

SEQ ID NO: 15293 - protein, 74 aa, Homo sapiens
  DOMAIN (21)..(41): kw TRANSCRIPTASE REVERSE II ORF2 domain identified by eMATRIX, accession number DM01354U, p-value=2.800e-17, raw score of 12.24
  misc_feature (1)...(74): Xaa = X or * as defined in Table 2
DLINKISKAAGYKINTEKSVAFLYTNSNQTEKEIKKAIPFTITTKNKTKYLGINLTKEVXELYQENFETLMKGI

SEQ ID NO: 15294 - protein, 33 aa, Homo sapiens
  misc_feature (1)...(33): Xaa = X or * as defined in Table 2
LSIRGLNIIIKRQRLXDWIKQQDSTLCCPXEIH

SEQ ID NO: 15295 - protein, 95 aa, Homo sapiens
  misc_feature (1)...(95): Xaa = X or * as defined in Table 2
QQRRPPGLRPPHHPRGQDQLWLGKGWGAAQLXEGPSGGSRGRGVERERGRRRKGRKGRAXRGTRKAGGEGRRETALASLPLRGHRSPQERPRPTL

SEQ ID NO: 15296 - protein, 150 aa, Homo sapiens
  misc_feature (1)...(150): Xaa = X or * as defined in Table 2
TAKTTFFRNAHSKHLSXNVCKPVEETQRPPTLQEIKQKIDSYNTREKNCLGMKLREDGTYTGFIKVHLKLRRPGTVPAGIRPQSIYDAIKEANLAVTTDKRTSFYLPLDAIKQLHISSTTTVSEGIQGLVKKFNGVDNPQKVALFKRIHK

SEQ ID NO: 15297 - protein, 160 aa, Homo sapiens
NVLCGNNQISDLGILLPEVCMAPEEKGDKDDQLNKETEDYLNSLFEGFLKVTEDSLSYEDNQDDDSDLLQDLSPEEASYSLQENLPSDESCLSLDDLAKRIEIAEVVPTEGLVSILKKRNDTVGDHPAQMQHKPSKRRVRFQEIDDSLDQESLGFGDGAL

SEQ ID NO: 15298 - protein, 373 aa, Homo sapiens
  misc_feature (1)...(373): Xaa = X or * as defined in Table 2
HYYATDRFPFERVRILLYYTYSYVPSFPSYTKCCFEFLTIYFSSSLESKTCLGTESSKESQHTVEPLGSSPCCHQMDVQTDSPSLSVTAGKDHMEELLCSAEATLALHTQSSETAGSPSGPDSSEDACEDDSRLQLAQTEACQDVARIEGIAEDPKVFLSSKSKTEPLISPGCDRIPPALISEGKYSQAQRKELRLPLRDASEALPTDQLENNELNELQQPDLTDSDGKSPQAQADSNGSENVLCGNNQISDLGILLPEVCMAPEEKGDKDDQLNKETEDYLNSLLKGCLKDTEDSLSYEDNQDDDSDLLQDLSPEEASYSLQENLPSDESCLSLDDLAKRIEIAEVNQRXSTIKSKMAFKKHIYVLNIALFL

SEQ ID NO: 15299 - protein, 129 aa, Homo sapiens
  misc_feature (1)...(129): Xaa = X or * as defined in Table 2
SDSRETRVVINLKDSVFCLYCKLFGEGKNQVKNENGCKDWQHLSHILSKHEESEMHINNSVKYSKLKSDLKKNKAIDAAERRLYENEEKXWCAVVVHVIYLSCFLGMMIRNLTLLRKTSVLAIVSTIVL

SEQ ID NO: 15300 - protein, 80 aa, Homo sapiens
  misc_feature (1)...(80): Xaa = X or * as defined in Table 2
KRGEKAPETSKTTSTWRIPCRKRRLSNRDFPDLSTGEELPETCGSCLRRGSGRENXDAETWPAQCPECESKAAVSTRFLF

SEQ ID NO: 15301 - protein, 139 aa, Homo sapiens
  misc_feature (1)...(139): Xaa = X or * as defined in Table 2
EPLSSPLFCPXNQSKIHPPPIFLAPTWPHPHHFPPGPGQPPFPLSTGSHLVLXQKPKGAHEHLSGIPPSLAQNPTWVPPHPGKRSSPHSATRPCKICPRLLAPSTLLTPSNLTGPXPLLPGALPGLLGPPENFCTGCFL

SEQ ID NO: 15302 - protein, 41 aa, Homo sapiens
  misc_feature (1)...(41): Xaa = X or * as defined in Table 2
RFWDYGRIALVSXADSESRFQRLSSTSSSGQQDFENELVGI

SEQ ID NO: 15303 - protein, 77 aa, Homo sapiens
MNFTNFTYISGSGGAGEYCAFSKLPGESHRIVWWNLWPFPRPRLLSACRCQPQRHLPCALWELVLVNPTGCSRISSE

SEQ ID NO: 15304 - protein, 115 aa, Homo sapiens
  DOMAIN (25)..(46): GLUTELIN SIGNATURE domain identified by eMATRIX, accession number PR00211B, p-value=9.333e-09, raw score of 0.86
  misc_feature (1)...(115): Xaa = X or * as defined in Table 2
DSRSPSPASPPTQXCRPSSFPGPAPPPRLWLAPPFCPPPPPHGYGPFPARKRRGAALGLTRVLPPPGSAVRRSPGPGPGSAWDKTLKMKQKKFGRSVGLWRELIRDCSLAELLSA

SEQ ID NO: 15305 - protein, 36 aa, Homo sapiens
GRSLEASQSAGITGVSHSTRPIDILLIKAVYISLSH

SEQ ID NO: 15306 - protein, 78 aa, Homo sapiens
  misc_feature (1)...(78): Xaa = X or * as defined in Table 2
VFFFFFETECRSIAQAGVXCSLRLPPPGSSDSRASVSRVAGIVGACHHAQLIFVFVVAMGFHHVGEAGLEHLTSSDLP

SEQ ID NO: 15307 - protein, 140 aa, Homo sapiens
  misc_feature (1)...(140): Xaa = X or * as defined in Table 2
VARERRLPGPQEGPHGRAAGSASPLAPSIAPSPPGPPALPASHILGSQALPSPETPWXSPWDPPAPLALVSPWQFPPGPPAPATPXRSPLGLQTPQAPGSWAPPVPATPQASGLPAPHVPETPWASSXLALPVPETPWDL

SEQ ID NO: 15308 - protein, 145 aa, Homo sapiens; identical to SEQ ID NO: 12395

SEQ ID NO: 15309 - protein, 167 aa, Homo sapiens
  DOMAIN (3)..(36): CAP-Gly domain identified by PFam, accession name CAP_GLY, E- value=0.032, PFam score of 12.9
  misc_feature (1)...(167): Xaa = X or * as defined in Table 2
VLAGLELEDECAGCTDGTFRGTRYFTCALKKALFVKLKSCRPDSRFALLQPVSNQIERCNSLAFGGYLSEVVEENTPPKMEKEGLEIMIGKKKGIQGHYNSCYLDSTLFCLFAFSSVLDTVLLRPKEKNDVEYYSETQELLRTEIVNPLRINXYCSRFPIRLSAVTL

SEQ ID NO: 15310 - protein, 115 aa, Homo sapiens
  DOMAIN (25)..(45): kw TRANSCRIPTASE REVERSE II ORF2 domain identified by eMATRIX, accession number DM01354W, p-value=1.100e-11, raw score of 12.64
  misc_feature (1)...(115): Xaa = X or * as defined in Table 2
KLENXKMVLKEIKEDLNKQTDILFSXLQRLITVRMSILPKLIYKFSAIPIQIPAXFLXIKIIIKCMRKGKXTRIAETASSSSSPSQSFILSPKLDHRGGITANCTPPWAIKGKLL

SEQ ID NO: 15311 - protein, 177 aa, Homo sapiens
  DOMAIN (14)..(54): Band 41 family domain proteins. domain identified by eMATRIX, accession number BL00660B, p-value=8.071e-15, raw score of 17.33
  DOMAIN (1)..(115): FERM domain (Band 4.1 family) domain identified by PFam, accession name Band_41, E-value=2.8e-30, PFam score of 96.6
  misc_feature (1)...(177): Xaa = X or * as defined in Table 2
FYHADHAALKDEMTEYXVFLQIKRYLYHGRLLCKHPDAALLAAYIIQAEIGNHDSGXHPEGYSSKFQFFPKHSEKLERKIAEIHKTELSGQTPATSELNFLRKAQTLETYGVDPHPCKDVSGNAAFLAFTPFGFVVLQGNKRVHFIKWNEVTKLKFEGKTFYLYVSQKKKGIGSCPV

SEQ ID NO: 15312 - protein, 78 aa, Homo sapiens
  misc_feature (1)...(78): Xaa = X or * as defined in Table 2
KSCLNIFGLKQTTSSLRWNRVKKXAHTYGXQLIFNKGAKIIHWIKYNPANGICYWISICKKVNLDPYLIPYTIIQNGS

SEQ ID NO: 15313 - protein, 142 aa, Homo sapiens
  misc_feature (1)...(142): Xaa = X or * as defined in Table 2
AWLSALNSSLPATWSCCPSLGASHKLQWEATSPTVPPRAPSQVKCAACEPTPPTLPCLPFQPPPRSLSSQAQVLLTGHPGXGPLRRQGEGLLRSKGCQARLTQPNSGEGGAVSXTGRPGDGAVGEAAPETTRRDCPTAPPAS

SEQ ID NO: 15314 - protein, 143 aa, Homo sapiens; identical to SEQ ID NO: 8541
  DOMAIN (21)..(43): Globins profile domain identified by eMATRIX, accession number BL01033A, p-value=2.929e-17, raw score of 16.94
  DOMAIN (10)..(143): Globin domain identified by PFam, accession name globin, E- value=4.3e-55, PFam score of 196.4

SEQ ID NO: 15315 - protein, 126 aa, Homo sapiens
  misc_feature (1)...(126): Xaa = X or * as defined in Table 2
GTRLLVRYTPKEPQVWTPTFVEVFGDLGQVGPEXCXHPEAKRMPCAQDYLSVVLNQLCVLYEKTPLSDRDTKCCTESLVNRRPCFSALEGDEAYDPQELNAETLTFHADICTLSEKERQIYKQTVL

SEQ ID NO: 15316 - protein, 129 aa, Homo sapiens
  DOMAIN (27)..(74): kw TRANSCRIPTASE REVERSE II ORF2 domain identified by eMATRIX, accession number DM01354V, p-value=1.957e-37, raw score of 12.97
  misc_feature (1)...(129): Xaa = X or * as defined in Table 2
NVQKSLAFLYTNNSQVESQIRNAIPFTPATKRIKYLGIPLTREVKGLYNENYKTLLKEFREDPNKWKNFPCSWVGRINIIKMAMLSKAMXRFPRVHIKIPGTFFTELGKPILKFIWNQKRAQIPRATRA

SEQ ID NO: 15317 - protein, 100 aa, Homo sapiens
  misc_feature (1)...(100): Xaa = X or * as defined in Table 2
TSTLKKLEEKQTQSRRKEIKIPAEINAIENKQIEKISKTKSCSFKXSIKITNPXLKQXTKEKIXINNIKNKRGQVTMAFVAIKRISREYCQXLYTNKFNI

SEQ ID NO: 15318 - protein, 85 aa, Homo sapiens
  misc_feature (1)...(85): Xaa = X or * as defined in Table 2
KQWKPAPPGPANPLPRGTSGPEXKGPHSDKAKPFSPFFKKRQWGGAPSRSKKARGKGQPPKGGHLKGPLRVVNGVXRAPLNRTAA

SEQ ID NO: 15319 - protein, 110 aa, Homo sapiens
  DOMAIN (58)..(79): ENDOTHELIN-B RECEPTOR SIGNATURE domain identified by eMATRIX, accession number PR00571D, p-value=4.281e-09, raw score of 8.46
  misc_feature (1)...(110): Xaa = X or * as defined in Table 2
QIKPPRLRDTPHSFTPYHPVRRGLVYFPSAPSPAKGEQLHTRTRHNVLGSHPRRRLPRSSXSSHRVTRGSLGSVPPARSTSYGPSRQWDLACPLTPEGVWRTKNNKPEAL

SEQ ID NO: 15320 - protein, 81 aa, Homo sapiens
  misc_feature (1)...(81): Xaa = X or * as defined in Table 2
GPSPYTDPTPTYPXLTLLLTNPRTNSTLPPTLHLPSRPTPSSPPSTSLPPSLVLRFFLKIQSGKRRAYPEHFWGQNGERKV

SEQ ID NO: 15321 - protein, 74 aa, Homo sapiens; identical to SEQ ID NO: 15293
  DOMAIN (21)..(41): kw TRANSCRIPTASE REVERSE II ORF2 domain identified by eMATRIX, accession number DM01354U, p-value=2.800e-17, raw score of 12.24
  misc_feature (1)...(74): Xaa = X or * as defined in Table 2

SEQ ID NO: 15322 - protein, 141 aa, Homo sapiens
  misc_feature (1)...(141): Xaa = X or * as defined in Table 2
VLEELPISVLFNSSSVPAWQWLAHVYHSHGMMRAAQMCYIKTLQLASQRRSWWAKLSSLWRLALLALKGCMANISNDYWPSLVQEATTEALKLCFCPLAVLLLALLQFKRKMVSTXTLCLLERVVYHPGPSKFIGSNWPAV

SEQ ID NO: 15323 - protein, 87 aa, Homo sapiens
  misc_feature (1)...(87): Xaa = X or * as defined in Table 2
ETNSLFGPQVKRQGNDLGXLNPPPRGFKKFSGLTLRRSGNYRPSPPRVFGFXGKRGLNWVAKGGLDLLSXNNPPPWPSQGARIMGES

SEQ ID NO: 15324 - protein, 75 aa, Homo sapiens
MYLGASSQLSPLYPELQAQEPMIQIPRPPHCGSIHWVVGTSHSVPLQPLKHRQRPLEYCPLPLHNTGQAALDQSG

SEQ ID NO: 15325 - protein, 184 aa, Homo sapiens
  DOMAIN (31)..(53): Globins profile domain identified by eMATRIX, accession number BL01033A, p-value=2.929e-17, raw score of 16.94
  DOMAIN (10)..(81): Globin domain identified by PFam, accession name globin, E- value=2e-05, PFam score of 23.4
  misc_feature (1)...(184): Xaa = X or * as defined in Table 2
APSPDAMGHFTEEDKATITSLWCKVNVEDAGGETLGRLLVVYPWTQRFFDSFGNLSSASAIMGNPKVKAHGKKVLTSLGDAIKHLDDLKGTFAQAXSELHCDKAAMWIPENFKLLGNVLVTRFGQSHFRQKNFTPEGCKASWAERWVTCSWPVALFLQDTTEAQLPMNAELFKDKAFILASNYK

SEQ ID NO: 15326 - protein, 91 aa, Homo sapiens
  misc_feature (1)...(91): Xaa = X or * as defined in Table 2
PPFVAQLGGKGGNLGXLNPPPRGXRQFSSLGPPISGNYGPPPPSRVIFGFLRKKGVSPSGPGGFGIPDLKIGPFNPPKGLGXRGGPWGPNQ

SEQ ID NO: 15327 - protein, 109 aa, Homo sapiens
  DOMAIN (32)..(73): kw TRANSCRIPTASE REVERSE II ORF2 domain identified by eMATRIX, accession number DM01354I, p-value=1.600e-11, raw score of 15.55
  misc_feature (1)...(109): Xaa = X or * as defined in Table 2
PEIISGFFFDHHGIKLETPKRNFGNYPNTWKLSNTLLNDQGVIEGISSSSLKWLKTNEKGNPTYQSLXDTAKAVLKGNLTAISAYIKNREKLQINKQCIFNYPEKQEQM

SEQ ID NO: 15328 - protein, 106 aa, Homo sapiens
  misc_feature (1)...(106): Xaa = X or * as defined in Table 2
QHFWENFHVTKDRINTGERQETDWKIFATYLMKKVXISRKCYNSYKLVRKKQLNRKWAKEKNKQSQKKKQSGQXTKTVQPQXNKRNADXRYYLSPISLAKSNKLNY

SEQ ID NO: 15329 - protein, 133 aa, Homo sapiens
  DOMAIN (34)..(47): PROTEIN ZINC-FINGER METAL-BINDI domain identified by eMATRIX, accession number PD00066, p-value=3.143e-12, raw score of 13.92
  DOMAIN (16)..(122): Zinc finger, C2H2 type domain identified by PFam, accession name zf-C2H2, E-value=1.6e-25, PFam score of 98.2
  misc_feature (1)...(133): Xaa = X or * as defined in Table 2
ESRLICQQMYMGEKPFGCSCCEKAFSNKSYLLVHQQTHAEEKPYGCNECGKDFSSKSYLIVHQRIHTGEKLHECSECRKTFSFHSQLVIHQRIHTGENPYECCECGKVFSRIDQLVSHQKTHSXQKPYVCNEW

SEQ ID NO: 15330 - protein, 106 aa, Homo sapiens
  DOMAIN (24)..(63): kw TRANSCRIPTASE REVERSE II ORF2 domain identified by eMATRIX, accession number DM01354X, p-value=6.021e-09, raw score of 13.86
  misc_feature (1)...(106): Xaa = X or * as defined in Table 2
SHLPNSSFEQKYAYEFVPGYQKHYTLSKFPWPFFAEMEKLILKFKWKSXSHITEAILRRKNKVGDLTLSDVKSSLXRYDNQLLSVXYXYKHRRIGPWDHGRPDIHL

SEQ ID NO: 15331 - protein, 102 aa, Homo sapiens
  misc_feature (1)...(102): Xaa = X or * as defined in Table 2
VCPCSQLNKAITSTTRCLRGFVCSSSCYRRRARERGMEKQTQRERERQRXRERQRRGEERQRGGKREPHSRARGGGGSRERERVRELXSDSDRSLEREALLR

SEQ ID NO: 15332 - protein, 165 aa, Homo sapiens
  misc_feature (1)...(165): Xaa = X or * as defined in Table 2
GLAHSAVRHSSFWGHLQDSGPLVPPGAGQGSLGLLAAEWVGKASPWGPAPACPTPHSEALVCSFRTSPPSTPHAHPGPVSGPASVLAALRLGLHLLRGCGGGTPTSPQTLQDEEANXGHRGHGDRLLRLTQAPTAQPLWHRPWQKDWPNLLPRPLSFWCRPPPRP

SEQ ID NO: 15333 - protein, 125 aa, Homo sapiens
  misc_feature (1)...(125): Xaa = X or * as defined in Table 2
AYWGRKTPWLTISSFWPTPGSPYYDNGRPLCYSDSDAVLLCFDISRPETGDSALKKVRLDQLSNLXLSMRTKKESGPCHECLLLTSRNGSQGRKRFAQGHTISYSSGTGTWVSLPHCLPPFLLSH

SEQ ID NO: 15334 - protein, 73 aa, Homo sapiens
  misc_feature (1)...(73): Xaa = X or * as defined in Table 2
AGPGGSPHGYVGSPLRISTRTHLCFAATRSLLHIDPLIVLPLVDLKDRIIIXNLWGLQPLPPASLLQPTALYS

SEQ ID NO: 15335 - protein, 137 aa, Homo sapiens
SPGTCGRRPQTMPPGAPDFPAVEGRSLGLSPSQGGPAGAGGDAGPQEDVRQPPGELAHGPLLPAQTGSPGPQGLWLHRNPTSGPPSQIGEGAEQGDEGVADAPQIQCKNVLKIRRRKMNHHKYRKLVKKTRFLRRKV

SEQ ID NO: 15336 - protein, 43 aa, Homo sapiens
APSPDAMGHFTEEDKATITSLWGQCPVLQIPLSSLPMMQSFQG

SEQ ID NO: 15337 - protein, 120 aa, Homo sapiens
YSTSPAGQVGRLSPSQGGPAGAGGDAGPQEDVRQPPGEAGSRPAASCPDWIPGAAGHVAPPQSYQCPPSQIGEGPGGTPETQADQVRERPEAHLAEGGAKGSPRRAGRPPRSTCGANESG

SEQ ID NO: 15338 - protein, 243 aa, Homo sapiens
  DOMAIN (216)..(238): PROSTANOID EP1 RECEPTOR SIGNATURE domain identified by eMATRIX, accession number PR00580E, p-value=7.085e-10, raw score of 7.15
  misc_feature (1)...(243): Xaa = X or * as defined in Table 2
NLKAHPRRPFNPPLASGPFPLILAGADTWXGIGGWKPTSSLRVPGIQSGAGSERGREPSSPGGXRTSSWGPASPPAPAGPPCEGERPRLPGPAGDVLXRETADPAAQHSMRQAKAGGRLPKERPSTAGKSGAPGAWSVGGGHRSQGSSTRLKLTVLRPPSGTSGPSPSRPRSAAATRRFLRTAPAGVLAAPDSALAQAPPGPKGDGFRGCGPWIYPQVQNRFRTTQGPDSQRADGSAGSRLRK

SEQ ID NO: 15339 - protein, 104 aa, Homo sapiens
  misc_feature (1)...(104): Xaa = X or * as defined in Table 2
SLRYTFLYTFPIILEHIIVLMQQTCCLHGFISIYLLIHTFILQIHPFHTLFQQTCSSIQQLYFLVXYFAYVYTFLFILYLSYPFLYYYXACFETFDSFNEIGRV

SEQ ID NO: 15340 - protein, 113 aa, Homo sapiens
MATSELSCEVSEENCERREAFWAEWKDLTLSTRPEEGCSLHEEDTQRHETYHQQGQCQVLVQRSPWLMMRMGILGRGLQEYQLPYQRVLPLPIFTPAKMGATKEERGVPSTLC

SEQ ID NO: 15341 - protein, 171 aa, Homo sapiens
GVIMATSELSCEVSEENCERREAFWAEWKDLTLSTRAEREGCSLHEEDTQRHETYHHQGQGQVLAQRSPWLMMRMGILGRGLQEYQLPYQRVLPLPIFTPAKMGATNEEREDTPIQLQELLALETALGGQRVDRQEVAEITKQLPPVVPVSKPGALRRSLSRSMSQEAQRG

SEQ ID NO: 15342 - protein, 139 aa, Homo sapiens
  DOMAIN (100)..(115): Polyprenyl synthetases proteins domain identified by eMATRIX, accession number BL00723B, p-value=4.600e-14, raw score of 14.35
  misc_feature (1)...(139): Xaa = X or * as defined in Table 2
HEAGSRMNGDHNSDVFSQDXQDFVQHFCQIGRVLTEDEMGHPEIGDAIARLKEVLEYNAIGGKYNRGLTVVVAFRELVEPRKQDADSLQRAWTVGWCVEADDIMDSSLTRRGQICWYQKPGVGLDAINDANLLEACIYR

SEQ ID NO: 15343 - protein, 78 aa, Homo sapiens
  misc_feature (1)...(78): Xaa = X or * as defined in Table 2
GTRVVAFRELVEPRKQDADSLQRAWTVGWCVELVRGVGQGRRSFLQWWXLGWEGEGWAXNLFLGCVCVSLSLVCYGQI

SEQ ID NO: 15344 - protein, 355 aa, Homo sapiens
  DOMAIN (237)..(260): Polyprenyl synthetases proteins domain identified by eMATRIX, accession number BL00723D, p-value=7.136e-20, raw score of 17.32
  DOMAIN (44)..(329): Polyprenyl synthetases domain identified by PFam, accession name polyprenyl_synt, E-value=3.9e-88, PFam score of 306.2
TGDQNSDVYAQEKQDFVQHFSQIVRVLTEDEMGHPEIGDAIARLKEVLEYNAIGGKYNRGLTVVVAFRELVEPRKQDADSLPAGPWTVGWCVELLQAFFLVADDIMDSSLTPPGNRSCWYQKPGVGLDAINDGNLLEACIYRLLKLYCREQPYYLNLIELFLQSSYQTEIGQTLDLLTAPPQGNVDLSEFTEKRYKSIVKYKTAFYSFYLPIAAAMYMAGIDGEKEHANAKKILLEMGEFFQIQDDYLDLFGDPSVTGKIGTDIQDNKCSWLVVQCLQRATPEQYQILKENYGQKEAEKVARVKALYEELDLPAVFLQYEEDSYSHIMALIEQYAAPLPPAVFLGLARKIYKRRK

SEQ ID NO: 15345 - protein, 160 aa, Homo sapiens
  misc_feature (1)...(160): Xaa = X or * as defined in Table 2
ETPVPATSAAIRILVLLPSLRVTSPGRQGPSVDRVVFPPFKFRPERSRHAAAGPNVVRPQPKPHEVGGERRGRPNAPANSFRSCSNLSPQYSLPKQNKSSTNPXIPNKPTPPASPSGRTDGLSLLQPLPGSDGQASPTMRSSPAISSALEIEFGKTNPFH

SEQ ID NO: 15346 - protein, 143 aa, Homo sapiens
  misc_feature (1)...(143): Xaa = X or * as defined in Table 2
SGSSRPRGSAQPRPGPGACGMAAPTSEXSSPPAWQPRPPCGGLHHCPACVHPHRDSGGSVPAPAACCHTPHGRPWPEFEGQRPQTQPQPQGPAWVRPVLTLFAGRVASVPLVSLCAWASGSQPGPPSGGSGRALCTGLGAPPA

SEQ ID NO: 15347 - protein, 92 aa, Homo sapiens
  DOMAIN (31)..(53): Globins profile domain identified by eMATRIX, accession number BL01033A, p-value=2.385e-18, raw score of 16.94
  DOMAIN (9)..(92): Globin domain identified by PFam, accession name globin, E- value=4.8e-21, PFam score of 77.8
APRADAMGHFTEEDKATITSLWGKANVEDAGGEALGRLLVVYPWTQRFFDSFGQLSELHCDKLHVDPENFKLLGNVLVTRFAIHFRKEFTPE

SEQ ID NO: 15348 - protein, 110 aa, Homo sapiens
  misc_feature (1)...(110): Xaa = X or * as defined in Table 2
VCKLQPQPLPAHSGSPNIHISQLCPSHAWGLLVLSSGCVTFLRESFFLCFALVLQRKSSSLGILSCPGSIFTALNSTNLYILGFLGGFCLVFFXDRVSLCHPGWSEVVQS

SEQ ID NO: 15349 - protein, 113 aa, Homo sapiens
  misc_feature (1)...(113): Xaa = X or * as defined in Table 2
LFYLYHLLFFGFGLFLFFLIKLGSSLFINFSKKSVLXFTNWIYFSVLYFTDFCFIFIISFFGFSLIYFIIVGFPLKFIGFILSFIXITVFYGQAQWLTPVIPILWVAEVRGSL

SEQ ID NO: 15350 - protein, 99 aa, Homo sapiens
  misc_feature (1)...(99): Xaa = X or * as defined in Table 2
NGPPXRKKFFLSIPRKIWAPPGFFXEGPPLFFFFFFLTESCSVAXPGMRWHNPGLLQPLPSGFKQFSCLSLPSSWDYRCPLPHPANFFVVVFLVETEFC

SEQ ID NO: 15351 - protein, 903 aa, Homo sapiens
  DOMAIN (79)..(101): TRANSFORMING PROTEIN P21 RAS SIGNATURE domain identified by eMATRIX, accession number PR00449A, p-value=4.938e-11, raw score of 13.20
  DOMAIN (613)..(733): Putative GTP-ase activating protein for Arf domain identified by PFam, accession name ArfGap, E-value=1.2e-62, PFam score of 221.5
PGKTGLGNMHAQRQFVVAAVRAEVRRHEVAKQALNRLRKLAERVDDPELQDSIQASLDSIREAVINSQEWTLSRSIPELRLGVLGDARSGKSSLIHRFLTGSYQVLEKTESEQYKKEMLVDGQTHLVLIREEAGAPDAKFSGWADAVIFVFSLEDENSFQAVSRLHGQLSSLRGEGRGGLALALVGTQDRISASSPRVVGDARARALCADMKRCSYYETCATYGLNVDRVFQEVAQKVVTLRKQQQLLAACKSLPSSPSHSAASTPVAGQASNGGHTSDYSSSLPSSPNVGHRELRAEAAAVAGLSTPGSLHRAAKRRTSLFANRRGSDSEKRSLDSRGETTGSGRAIPIKQSFLLKRSGNSLNKEWKKKYVTLSSNGFLLYHPSINDYIHSTHGKEMDLLRTTVKVPGKRPPRAISAFGPSASINGLVKDMSTVQMGEGLEATTPMPSPSPSPSSLQPPPDQTSKHLLKPDRNLARALSTVLSGQDYYPYFRDKETEAQKIKCLAQGLKANCTPSGDLSPLSREPPPSPMVKKQRRKKLTTPSKTEGSAGQAEEENFEFLIVSSTGQTWHFEAASFEERDAWVQAIESQILASLQCCESSKVKLRTDSQSEAVAIQAIRNAKGNSICVDCGAPNPTWASLNLGALICIECSGIHRNLGTHLSRVRSLDLDDWPRELTLVLTAIGNDTANRVWESDTRGRAKPSRDSSREERESWIRAKYEQLLFLAPLSTSEEPLGRQLWAAVQAQDVATVLLLLAHARHGPLDTSVEDPQLRSPLHLAAELAHVVITQLLLWYGADVAARDAQVRTALFYARQAGSHLCADILLQHACPGEGGSAATTPSAATTPSITATPSPRRRSSAASVGRADAPVALHSWGRPTFTMGVLPPKAKGKEKGISIESTK

SEQ ID NO: 15352 - protein, 147 aa, Homo sapiens
  DOMAIN (10)..(45): PH domain identified by PFam, accession name PH, E-value=4.5e -05, PFam score of 23.2
  misc_feature (1)...(147): Xaa = X or * as defined in Table 2
PHPIPHSEENFEFLIVSSTGQTWHFEAASFEERDAWVQAIESQILASLQCCESSKVKVRVXGGVEDWPQELTLVLTAIGNDTAEVVXEESRGVXEGGGAWRQSQCQPQPSLQLRTDSQSEAVAIQAIRNAKGNSICAHASADAWVEA

SEQ ID NO: 15353 - protein, 122 aa, Homo sapiens
  DOMAIN (85)..(100): FIBRONECTIN TYPE III REPEAT SIGNATURE domain identified by eMATRIX, accession number PR00014D, p-value=4.600e-11, raw score of 12.04
  DOMAIN (14)..(102): Fibronectin type III domain identified by PFam, accession name fn3, E-value=7e-13, PFam score of 56.2
  misc_feature (1)...(122): Xaa = X or * as defined in Table 2
PSDPEVAGDPIFPPGPPSCPEVKDKTKSSISLGWKPPAKDGGSPIKGYIVXMQEEGTTDWKRVNEPYKLITTWECGGPNLKELRKYRFRVKAVNEAGESEPRDTTGEIPATDIQEEPEVFID

SEQ ID NO: 15354 - protein, 121 aa, Homo sapiens
  misc_feature (1)...(121): Xaa = X or * as defined in Table 2
FKIQNLIASTVRTVMVADCSRFDSPDLLLEAGDPATSPCRIFDLGSDNEEVVAIPDPSHPKEGLSYSLSCVLLGRSLPRCLISCYIPLCLSVASGPHKFYXPHCQHRPHGDGGRLQPLRQP

SEQ ID NO: 15355 - protein, 49 aa, Homo sapiens
  misc_feature (1)...(49): Xaa = X or * as defined in Table 2
NDISANPAIKKFWKLPKCPTTEGWLNTXLYIHLVEYYATLKVCGDLYVR

SEQ ID NO: 15356 - protein, 266 aa, Homo sapiens
  misc_feature (1)...(266): Xaa = X or * as defined in Table 2
WRNSADVWWYCGGPLLDTLPSNWSGTCTLVQFAIPFALAFLQPEKEKPQHRKIREAPYGSFDSQVYLDATGVPQGVPHKFKAQDQIAAGFESIFWWVTISKNIDWINYIYYNQQRFINYTRDAVKGIAEQLGPTSQMAWENRMALDMILAKKGGVCVMIKTQCCTFIPNNTAPSGSITRALQGLTALSNELAKNSGVNDPFSGWLERWFGKWKGIIASILTSLAARIGVVILFGCXVTPCIRGLVQRLIETVLTKTSLSSPPPYSD

SEQ ID NO: 15357 - protein, 83 aa, Homo sapiens
  misc_feature (1)...(83): Xaa = X or * as defined in Table 2
WLHAPECFSQCPSQPSPSXLGCQGPESDPDPRSVVGPPLSQAGSPGRPGGTVITLCCLWPHLAPLFHLWSPGKCTSLLVVQHS

SEQ ID NO: 15358 - protein, 142 aa, Homo sapiens
  DOMAIN (31)..(53): Globins profile domain identified by eMATRIX, accession number BL01033A, p-value=2.929e-17, raw score of 16.94
  DOMAIN (9)..(142): Globin domain identified by PFam, accession name globin, E- value=1.5e-49, PFam score of 177.2
APSPDAMGHFTEEDKATITSLWGKVNVEDAGGETLGRLLVVYPWTQRFFDSFGNLSSASAIMGNPKVKAHGKKVLTSLGDAIKHLDDLKGTLHVDPENFKLLGNVLVTVLAIHFGKEFTPEVQASWQKMVTGVASALSSRYH

SEQ ID NO: 15359 - protein, 174 aa, Homo sapiens
  misc_feature (1)...(174): Xaa = X or * as defined in Table 2
MTQPFNYSAFERIIFAGSPGHTVFSSERSLLVRPRSHPEPKGEHYVTGSPTPENQRTSAAMSKPHSEAGTAFIQTQQLHAAMADTFLEHMCRLDIDSPPRRPLPATPQKPPPWVPWRPPSSAAVGPXSSSPSLADVKSQVLVTCCLACHCHWQREEWVLVTLGQGCLSVSEFRV

SEQ ID NO: 15360 - protein, 201 aa, Homo sapiens
  misc_feature (1)...(201): Xaa = X or * as defined in Table 2
RSLGPCQHSWQSSPGGPRPQPRPPGLGPCTAQGRCHGTGGPDETVWGFRVTAMMGARGRYLAHLVSRLEMGWGSYIRVHFTRPQEVPSGRSNSSPSHPAQXGLWPLQHLLRRTPPEARAAPHPISPSACXVTICPLPPFHRPRDQDHLAPARSASPTVPPQPMVGRTPPTPXTLTQRGSPGPMSPAPIPLAANDSDKPSST

SEQ ID NO: 15361 - protein, 420 aa, Homo sapiens
  DOMAIN (46)..(97): Ets-domain proteins domain identified by eMATRIX, accession number BL00345B, p-value=1.000e-40, raw score of 21.28
  DOMAIN (17)..(96): Ets- domain identified by PFam, accession name Ets, E-value= 8.1e-60, PFam score of 192.3
  misc_feature (1)...(420): Xaa = X or * as defined in Table 2
KFPPKKTPPHLGMESAITLWQFLLQLLLDQKHEHLICWTSNDGEFKLLKAEEVAKLWGLRKNKTNMNYDKLSRALRYYYDKNIIKKVIGQKFVYKFVSFPEILKMDPHAVEISRESLLLQDSDCKVSPEGREAHKHGLAVLRSTSRNEYIHSGLYSSFTINSLENPPDAFKAIKREKLEEPPEDSPPVEEVRTVIRFVTNKTDKHVTRPVVSLPSTSEAAAASAFLASSVSAKISSLMLPNAASISSASPFSSRSPSLSPKSPLPSEHRSLFLEAACHDSDSLEPLNLSSGSKTKSPSLPPKAKKPKGLEISAPPLVLSGTDIGSIALNSPALPSGSLTPAFFTAQTPNGLLLTPSPLLSSIHFWGSLXSKFVPLSPARLQGPSTLFQFPTLLNGHMPVPIPSLDRAASPVLLSSNSQKS

SEQ ID NO: 15362 - protein, 410 aa, Homo sapiens
  DOMAIN (55)..(106): Ets-domain proteins domain identified by eMATRIX, accession number BL00345B, p-value=1.000e-40, raw score of 21.28
  DOMAIN (26)..(105): Ets- domain identified by PFam, accession name Ets, E-value= 8.1e-60, PFam score of 192.3
MGEIAFPICASVMVGFDLQHGMESAITLWQFLLQLLLDQKHEHLICWTSNDGEFKLLKAEEVAKLWGLRKNKTNMNYDKLSRALRYYYDKNIIKKVIGQKFVYKFVSFPEILKMDPHAVEISRESLLLQDSDCKASPEGREAHKHGLAALRSTSRNEYIHSGLYSSFTINSLQNPPDAFKAIKTEKLEEPPEDSPPVEEVRTVIRFVTNKTDKHVTRPVVSLPSTSEAAAASAFLASSVSAKISSLMLPNAASISSASPFSSRSPSLSPNSPLPSEHRSLFLEAACHDSDSLEPLNLSSGSKTKSPSLPPKAKKPKGLEISAPPLVLSGTDIGSIALNSPALPSGSLTPAFFTAQEMMVHVYSDSTRYQDLWELGYVHPLVSSVLSHYCRPMVLKVSMQNNLLEDAHLHI

SEQ ID NO: 15363 - protein, 118 aa, Homo sapiens
  misc_feature (1)...(118): Xaa = X or * as defined in Table 2
LPAPGARPEWLLFPAPVVGPVLCWTPQSIISLHFFLNPVGQTLSSSSSSSSSPXRTXLPMTLSXVGAVSGFKPISRPPEPHSGHNSPSLSQPSLTILVSSNSPGSGKARGPQCPQAWL

SEQ ID NO: 15364 - protein, 59 aa, Homo sapiens
  misc_feature (1)...(59): Xaa = X or * as defined in Table 2
LFGXLKAPPPGLKQFSGLSLRRSGNYGPPPPPPVYFFVFLKKNGFPLVTQGGLNLRTWG

SEQ ID NO: 15365 - protein, 74 aa, Homo sapiens
  misc_feature (1)...(74): Xaa = X or * as defined in Table 2
MQGVISPSTSTSLFVFLALVLPASHXPPQPPPLPGPPSEIAHLTTVRRGAALANVNHENISDTDENKLNAFVTA

SEQ ID NO: 15366 - protein, 168 aa, Homo sapiens
  misc_feature (1)...(168): Xaa = X or * as defined in Table 2
AGGAGEETPHQESQRQGCALPQEPPLYPPCPAIHPPPLPLGGLLLFPSLPSLALSCMVPPPWAAQEGIXMENHQPPEKKRLWGPPPANSPFPARPLNPHLFQAGTGCPPCPREVPTPSPPWAEPPPLPGPPSEIAHLTTVRRGAALANVNHENISDTDENKLNAFVTA

SEQ ID NO: 15367 - protein, 33 aa, Homo sapiens; identical to SEQ ID NO: 15294
  misc_feature (1)...(33): Xaa = X or * as defined in Table 2

SEQ ID NO: 15368 - protein, 175 aa, Homo sapiens
  misc_feature (1)...(175): Xaa = X or * as defined in Table 2
FNYLLKFKIRRPPHAFQMFPMSSQGKEGPETAESELSHHGCLSLXRXEISWAPPTCGAFPSSAATLGASPVLGASVPLGAAGMQRGRRGHRIPGDTWGLLLPGAGGTDAESPAHNWEPXTSVPPSRPGHPSGPSAGLQSGRPPLXGDCEWGRKAGKGHAYXVPGPELHTLPLSDP

SEQ ID NO: 15369 - protein, 158 aa, Homo sapiens
  DOMAIN (7)..(29): Globins profile domain identified by eMATRIX, accession number BL01033A, p-value=2.929e-17, raw score of 16.94
  DOMAIN (2)..(158): Globin domain identified by PFam, accession name globin, E- value=1e-52, PFam score of 188.3
VNVEDAGGETLGRLLVVYPWTQRFFDSFGNLSSASAIMGNPKVKAHGKKVLTSLGDASSASAIMGNPKVKAHGKKVLTSLGDAIKHLDDLKGTFAQLSELHCDKLHVDPENFKLLGNVLVTVLAIHFGKEFTPEVQASWQKMAEDVTGVASALSSRYH

SEQ ID NO: 15370 - protein, 3262 aa, Homo sapiens [sequence omitted]

SEQ ID NO: 15371 - protein, 4597 aa, Homo sapiens
  DOMAIN (833)..(845): Dihydrofolate reductase proteins domain identified by eMATRIX, accession number BL00075B, p-value=1.000e-08, raw score of 13.49
  DOMAIN (80)..(632): Lipoprotein amino terminal region domain identified by PFam, accession name Vitellogenin_N, E-value=4.9e-187, PFam score of 634.7
VPFSVAAAEEPAQPARAARPRPGRSPGAAPPQLAMDPPRPALLALLALPALLLLLLAGARAEEEMLENVSLVCPKDATRFKHLRKYTYNYEAESSSGVPGTADSRSATRINCKVELEVPQLCSFILKTSQCILKEVYGFNPEGKALLKKTKNSEEFAAAMSRYELKLAIPEGKQVFLYPEKDEPTYILNIKRGIISALLVPPETEEAKQVLFLDTVYGNCSTHFTVKTRKGNVATEISTERDLGQCDRFKPIRTGISPLALIKGMTRPLSTLISSSQSCQYTLDAKRKHVAEAICKEQHLFLPFSYKNKYGMVAQVTQTLKLEDTPKINSRFFGEGTKKMGLAFESTKSTSPPKQAEAVLKTVQELKKLTISEQNIQRANLFNKLVTELRGLSDEAVTSLLPQLIEVSSPITLQALVQCGQPQCSTHILQWLKRVHANPLLIDVVTYLVALIPEPSAQQLREIFNMARDQRSRATLYALSHAVNNYHKTNPTGTQELLDIANYLMEQIQDDCTGDEDYTYLILRVIGNMGQTMEQLTPELKSSILKCVQSTKPSLMIQKAAIQALRKMEPKDKDQEVLLQTFLDDASPGDKRLAAYLMLMRSPSQADINKIVQILPWEQNEQVKNFVASHIANILNSEELDIQDLKKLVKEVLKESQLPTVMDFRKFSRNYQLYKSVSIPSLDPASAKIEGNLIFDPNNYLPKESMLKTTLTAFGFASADLIEIGLEGKGFEPTLEALFGKQGFFPDSVNKALYWVNGQVPDGVSKVLVDHFGYTKDDKHEQDMVNGIMLSVEKLIKDLKSKEVPEARAYLRILGEELGFASLHDLQLLGKLLLMGARTLQGIPQMIGEVIRKGSKNDFFLHYIFMENAFELPTGAGLQLQISSSGVIAPGAKAGVKLEVANMQAELVAKPSVSVEFVTNMGIIIPDFARSGVQMNTNFFHESGLEAHVALKPGKLKFIIPSPKRPVKLLSGGNTLHLVSTTKTEVIPPLIENRQSWSVCKQVFPGLNYCTSGAYSNASSTDSASYYPLTGDTRLELELRPTGEIEQYSVSATYELQREDRALVDTLKFVTQAEGAKQTEATMTFKYNRQSMTLSSEVQIPDFDVDLGTILRVNDESTEGKTSYRLTLDIQNKKITEVALMGHLSCDTKEERKIKGVISIPRLQAEARSEILAHWSPAKLLLQMDSSATAYGSTVSKRVAWHYDEEKIEFEWNTGTNVDTKKMTSNFPVDLSDYPKSLHMYANRLLDHRVPQTDMTFRHVGSKLIVAMSSWLQKASGSLPYTQTLQDHLNSLKEFNLQNMGLPDFHIPENLFLKSDGRVKYTLNKNSLKIEIPLPFGGKSSRDLKMLETVRTPALHFKSVGFHLPSREFQVPTFTIPKLYQLQVPLLGVLDLSTNVYSNLYNWSASYSGGNTSTDHFSLRARYHMKADSVVDLLSYNVQGSGETTYDHKNTFTLSCDGSLRHKFLDSNIKFSHVEKLGNNPVSKGLLIFDASSSWGPQMSASVHLDSKKKQHLFVKEVKIDGQFRVSSFYAKGTYGLSCQRDPNTGRLNGESNLRFNSSYLQGTNQITGRYEDGTLSLTSTSDLQSGIIKNTASLKYENYELTLKSDTNGKYKNFATSNKMDMTFSKQNALLRSEYQADYESLRFFSLLSGSLNSHGLELNADILGTDKINSGAHKATLRIGQDGISTSATTNLKCSLLVLENELNAELGLSGASMKLTTNGRFREHNAKFSLDGKAALTELSLGSAYQAMILGVDSKNIFNFKVSQEGLKLSNDMMGSYAEMKFDHTNSLNIAGLSLDFSSKLDNIYSSDKFYKQTVNLQLQPYSLVTTLNSDLKYNALDLTNNGKLRLEPLKLHVAGNLKGAYQNNEIKHIYAISSAALSASYKADTVAKVQGVEFSHRLNTDIAGLASAIDMSTNYNSDSLHFSNVFRSVMAPFTMTIDAHTNGNGKLALWGEHTGQLYSKFLLKAEPLAFTFSHDYKGSTSHHLVSRKSISAALEHKVSALLTPAEQTGTWKLKTQFNNNEYSQDLDAYNTKDKIGVELTGRTLADLTLLDSPIKVPLLLSEPINIIDALEMRDAVEKPQEFTIVAFVKYDKNQDVHSINLPFFETLQEYFERNRQTIIVVLENVQRNLKHINIDQFVRKYRAALGKLPQQANDYLNSFNWERQVSHAKEKLTALTKKYRITENDIQIALDDAKINFNEKLSQLQTYMIQFDQYIKDSYDLHDLKIAIANIIDEIIEKLKSLDEHYHIRVNLVKTIHDLHLFIENIDFNKSGSSTASWIQNVDTKYQIRIQIQEKLQQLKRHIQNIDIQHLAGKLKQHIEAIDVRVLLDQLGTTISFERINDVLEHVKHFVINLIGDFEVAEKINAFRAKVHELIERYEVDQQIQVLMDKLVELAHQYKLKETIQKLSNVLQQVKIKDYFEKLVGFIDDAVKKLNELSFKTFIEDVNKFLDMLIKKLKSFDYHQFVDETNDKIREVTQRLNGEIQALELPQKAEALKLFLEETKATVAVYLESLQDTKITLIINWLQEALSSASLAHMKAKFRETLEDTRDRMYQMDIQQELQRYLSLVGQVYSTLVTYISDWWTLAAKNLTDFAEQYSIQDWAKRMKALVEQGFTVPEIKTILGTMPAFEVSLQALQKATFQTPDFIVPLTDLRIPSVQINFKDLKNIKIPSRFSTPEFTILNTFHIPSFTIDFVEMKVKIIRTIDQMLNSELQWPVPDIYLRDLKVEDIPLARITLPDFRLPEIAIPEFIIPTLNLNDFQVPDLHIPEFQLPHISHTIEVPTFGKLYSILKIQSPLFTLDANADIGNGTTSANEAGIAASITAKGESKLEVLNFDFQANAQLSNPKINPLALKESVKFSSKYLRTEHGSEMLFFGNAIEGKSNTVASLHTEKNTLELSNGVIVKINNQLTLDSNTKYFHKLNIPKLDFSSQADLRNEIKTLLKAGHIAWTSSGKGSWKWACPRFSDEGTHESQISFTIEGPLTSFGLSNKINSKHLRVNQNLVYESGSLNFSKLEIQSQVDSQHVGHSVLTAKGMALFGEGKAEFTGRHDAHLNGKVIGTLKNSLFFSAQPFEITASTNNEGNLKVRFPLRLTGKIDFLNNYALFLSPSAQQASWQVSARFNQYKYNQNFSAGNNENIMEAHVGINGEANLDFLNIPLTIPEMRLPYTIITTPPLKDFSLWEKTGLKEFLKTTKQSFDLSVKAQYKKNKHRHSITNPLAVLCEFISQSIKSFDRHFEKNRNNALDFVTKSYNETKIKFDKYKAEKSHDELPRTFQIPGYTVPVVNVEVSPFTIEMSAFGYVFPKAVSMPSFSILGSDVRVPSYTLILPSLELPVLHVPRNLKLSLPDFKELCTISHIFIPAMGNITYDFSFKSSVITLNTNAELFNQSDIVAHLLSSSSSVIDALQYKLEGTTRLTRKRGLKLATALSLSNKFVEGSHNSTVSLTTKNMEVSVATTTKAQIPILRMNFKQELNGNTKSKPTVSSSMEFKYDFNSSMLYSTAKGAVDHKLSLESLTSYFSIESSTKGDVKGSVLSREYSGTIASEANTYLNSKSTRSSVKLQGTSKIDDIWNLEVKENFAGEATLQRIYSLWEHSTKNHLQLEGLFFTNGEHTSKATLELSPWQMSALVQVHASQPSSFHDFPDLGQEVALNANTKNQKIRWKNEVRIHSGSFQSQVELSNDQEKAHLDIAGSLEGHLRFLKNIILPVYDKSLWDFLKLDVTTSIGRRQHLRVSTAFVYTKNPNGYSFSIPVKVLADKFIIPGLKLNDLNSVLVMPTFHVPFTDLQVPSCKLDFREIQIYKKLRTSSFALNLPTLPEVKFPEVDVLTKYSQPEDSLIPFFEITVPESQLTVSQFTLPKSVSDGIAALDLNAVANKIADFELPTIIVPEQTIEIPSIKFSVPAGIAIPSFQALTARFEVDSPVYNATWSASLKNKADYVETVLDSTCSSTVQFLEYELNVLGTHKIEDGTLASKTKGTFAHRDFSAEYEEDGKYEGLQEWEGKAHLNIKSPAFTDLHLRYQKDKKGISTSAASPAVGTVGMDMDEDDDFSKWNFYYSPQSSPDKKLTIFKTELRVRESDEETQIKVNWEEEAASGLLTSLKDNVPKATGVLYDYVNKYHWEHTGLTLREVSSKLRRNLQDHAEWVYQGAIREIDDIDERFQKGASGTTGTYQEWKDKAQNLYQELLTQEGQASFQGLKDNVFDGLVRVTQEFHMKVKHLIDSLIDFLNFPRFQFPGKPGIYTREELCTMFIREVGTVLSQVYSKVHNGSEILFSYFQDLVITLPFELRKHKLIDVISMYRELLKDLSKEAQEVFKAIQSLKTTEVLRNLQDLLQFIFQLIEDNIKQLKEMKFTYLINYIQDEINTIFNDYIPYVFKLLKENLCLNLHKFNEFIQNELQEASQELQQIHQYIMALREEYFDPSIVGWTVKYYELEEKIVSLIKNLLVALKDFHSEYIVSASNFTSQLSSQVEQFLHRNIQEYLSILTDPDGKGKEKIAELSATAQEIIKSQAIATKKIISDYHQQFRYKLQDFSDQLSDYYEKFIAESKRLIDLSIQNYHTFLIYITELLKKLQSTTVMNPYMKLAPGELTIIL

SEQ ID NO: 15372 - protein, 120 aa, Homo sapiens
  DOMAIN (2)..(120): SURF4 family domain identified by PFam, accession name SURF4, E-value=3.9e-69, PFam score of 243.1
ELFGIIALQTIAYSILWDLKFLMRNLALGGGLLLLLAESRSEGKSMFAGLMFMTLLHFDASFFSIVQNIVGTALMILVAIGFKTKLAALTLVVWLFAINVYFNAFWTIPVYKPMHDFLKY

SEQ ID NO: 15373 - protein, 297 aa, Homo sapiens
  DOMAIN (31)..(297): SURF4 family domain identified by PFam, accession name SURF4, E-value=4.2e-166, PFam score of 565.2
FRAAGAGADGREPASERASRAEPPAVAMGQNDLMGMAEDFADQFLRVTKQYLPHVARLCLISTFLEDGIRMWFQWSEQRDYIDTTWNCGYLLASSFVFLNLLGQLTGCVLVLSRNFVQYACFGLFGIIFLYTIAYSILWDLKFLMRNLALGGGLLLLLAESRSEGKSMFAGVPTMRESSPKQYMQLGGRVLLVLMFMTLLHFDASFLFLFVQNIVGTALMILVAIGFKTKLAALTLVVWLFAINVYFNAFWTIPVYKPMHDFLKYDFFQTMSVIGGLLLVVALGPGGVSMDEKKKEW

SEQ ID NO: 15374 - protein, 132 aa, Homo sapiens
  DOMAIN (57)..(95): Outer Capsid protein VP4 (Hemagglutinin) domain identified by eMATRIX, accession number PF00426S, p-value=9.063e-10, raw score of 15.67
  misc_feature (1)...(132): Xaa = X or * as defined in Table 2
GRVGRPTRPPTRPPTRPPTRSSSSSSSSSSSSSSSSSSSSSSSSSSSSSSSSSSSSSSSSSSSSSSSSSSSSSSSSSSSSSSSSSSSSSSFSSSSSGPFFGVSPCVPEILKSSSPRIGCPRNXAFPFKRGNL

SEQ ID NO: 15375 - protein, 75 aa, Homo sapiens
  DOMAIN (29)..(60): kw TRANSCRIPTASE REVERSE II ORF2 domain identified by eMATRIX, accession number DM01354G, p-value=6.854e-10, raw score of 11.57
  misc_feature (1)...(75): Xaa = X or * as defined in Table 2
IGNFKNVFSIVNITTRQNTSTDIENLKNNTHVXNTVSNSXYTVFSSACGTFTKISHLLRHXTSLDKFXKLDVLWS

SEQ ID NO: 15376 - protein, 122 aa, Homo sapiens
  DOMAIN (22)..(71): Eukaryotic RNA polymerase II heptapeptide repeat proteins domain identified by eMATRIX, accession number BL00115Z, p-value= 9.424e-11, raw score of 3.12
  misc_feature (1)...(122): Xaa = X or * as defined in Table 2
NPSIVGGQDLCKGNYKTQIKDLLADGSSSSSSSSSSSSSSSSSSSSSSSSSSSSSPAGPMKTPTSFLIELGKTIVQFLXNQKRVXITKVILSKKPQKTENKTKLEAFHSTLCYLPSNYATRL

SEQ ID NO: 15377 - protein, 119 aa, Homo sapiens
  DOMAIN (92)..(115): LACY PROTON/SUGAR SYMPORTER SIGNATURE domain identified by eMATRIX, accession number PR00174A, p-value=2.066e-09, raw score of 8.67
  misc_feature (1)...(119): Xaa = X or * as defined in Table 2
ISKKKFFLKGFFFLGFFXKKPPFFFFPPPPPGXRGKKKIFFFFWVKKNPLEKNFFSLFLKKGGPPTPPGGFFFFKKKKRAPQGGGPPKIFFFFFFFFFFFFFFFFGDGVLLCCPGWSAV

SEQ ID NO: 15378 - protein, 119 aa, Homo sapiens
  misc_feature (1)...(119): Xaa = X or * as defined in Table 2
GLPSXHYSPPQLPHXSHSHTIAPKAEEKANRKETHFSRSPQQISGRCPPQDKSLAKVDFLDQLRPMVGHSLGRGPGHLPKHMPTPEQIQEEPEAHIHLPLVCEQLPLLPWEDFVYGSSR

SEQ ID NO: 15379 - protein, 61 aa, Homo sapiens
  misc_feature (1)...(61): Xaa = X or * as defined in Table 2
NHXSPMFGYCICVCFETESCSVAQAGVQWYNRGSLQPPLPGPKGFVCLSLPSSWDYRRRPP

SEQ ID NO: 15380 - protein, 232 aa, Homo sapiens
  DOMAIN (31)..(53): Globins profile domain identified by eMATRIX, accession number BL01033A, p-value=2.929e-17, raw score of 16.94
  DOMAIN (9)..(176): Globin domain identified by PFam, accession name globin, E- value=8.3e-62, PFam score of 218.7
APSPDAMGHFTEEDKATITSLWGKVNVEDAGGETLGRLLVVYPWTQRFFDSFGNLSSASAIMGNPKVKAHGKKVLTSLGDAWGKVNVEDAGGETLGRLLVVYPWTQRFFDSFGNLSSASAIMGNPKVKAHGKKVLTSLGDATKHLDDLKGTFAQLSELHCDKLHVDPENFKLLGNVQPVLCLCHHGQPQSQGTWQEGADFLGRCVGQGECGRCWRRNPGKAPGCLPMDPEVL

SEQ ID NO: 15381 - protein, 90 aa, Homo sapiens
  misc_feature (1)...(90): Xaa = X or * as defined in Table 2
QPGPEGKIRFFLKIPNLTPSGGKSLKFPLFKRVKPENCLSLRGXGCNXPGPEGKIRFFLKIPNLTPSGGKSLKFPLFKRVKPENCLSLRG

SEQ ID NO: 15382 - protein, 95 aa, Homo sapiens
  misc_feature (1)...(95): Xaa = X or * as defined in Table 2
MWIPFSKFLVXXXXXXXXXXXXXXXXXXXXXXXXXXXXXXXXXXXXXXXXXXXXXXXXXXXXXXXXXXXXXXXXXXXXXXXXXXXXXXXXXXXXF

SEQ ID NO: 15383 - protein, 99 aa, Homo sapiens
  misc_feature (1)...(99): Xaa = X or * as defined in Table 2
ILGFVQWHDHSSPQPKTPGLKQSSCLNFLSSXDNRHMPPGLANFFIFVEMGSCYVAQACLELLGSSNPLASVSQNAGITSMSQCTQLFLLLLNRFPAFL

SEQ ID NO: 15384 - protein, 68 aa, Homo sapiens
  misc_feature (1)...(68): Xaa = X or * as defined in Table 2
NSSVFLHLQALGIPLHLAYVSVFPPTPGXGSGHGRSLLSISVGQGLPPQRPSPASPFHLDIIHQGPAW

SEQ ID NO: 15385 - protein, 115 aa, Homo sapiens
  misc_feature (1)...(115): Xaa = X or * as defined in Table 2
TCHRKRKKRNPRHGEVGLGYPTDESAFPSAPALGPGEPRVPGSSSGRASGHXWYPNAVESPXEEGELXGRRGETLVAEKKKKPRHGEVGPGSPMEKKCLPISPXAGPRGPRRPWF

SEQ ID NO: 15386 - protein, 32 aa, Homo sapiens
  misc_feature (1)...(32): Xaa = X or * as defined in Table 2
GHLSAIGHPFPXMSFNHGRKTRTWNYLGSEEQ

SEQ ID NO: 15387 - protein, 104 aa, Homo sapiens
  misc_feature (1)...(104): Xaa = X or * as defined in Table 2
PSRSFISNHXPHQDVXPRFFNGIHLXYSHTPGINHVEPEPNSTRSKACWEGFGSSNSGNGSFLGARXVDVQEVLTTTWRVIRVWNXCFGRNSAPMAQSKSSSES

SEQ ID NO: 15388 - protein, 96 aa, Homo sapiens
  misc_feature (1)...(96): Xaa = X or * as defined in Table 2
YFYYIFSIYHFIAPPYYFSLVFLHLVCPYLSSFLSRXKIHVCLKDFKVNFSXTIPKLSKLLELLESISLFFLXNVDFIILEILIPLYSAILKRVYF

SEQ ID NO: 15389 - protein, 319 aa, Homo sapiens
MGLLLKASSLASVTGFCLLQEGPQDQEVFYLLLFVNYFSAKQLLAYRCFVEMGSEILGPTLSETRPEALPPPSSNETPAVSDSKEKKNAAKKKCLYNFQDAFMEANKVVMATSSATSSVSCTATTVQSSNSQFRVSSKRPPSVARGDPDCEGHRCENGVYDPQQDDGDESADEDSCSEHSSSTSTSTNQKEGKYCDCCYCEFFGHGGNGFVLVLAIMRAAADTPALSAGEPSFRRKEPSTVEMIEERPSCCDCSTLKSSAHTSQSYSRFRLTIGPDWEALGEKPCPVPQKTRDCWSAENTVCPPFRSVQHRGTHDGPRP

SEQ ID NO: 15390 - protein, 1350 aa, Homo sapiens
  DOMAIN (975)..(1010): Matrix protein (MA) p15. domain identified by eMATRIX, accession number PF01140D, p-value=6.513e-10, raw score of 15.54
EKEPYEEISAEADREPQQLQNYWSEVRYTVRCIYRQAGTPLADDQDQSLVPDKEGVKELVDRLCERDPYQLYQRLEQQAREYVLEMKVRLLRQLSAAAKVKAPSGLQGPPQAHQFISLLLEEYGALCQAARSISTFLGTLENEHLKKFQVTWELHNKHLFENLVFSEPLLQSNLPALVSQIRLGTTTHDTCSEDTYSTLLQRYQRSEEELRRVAEEWLECQKRIDAYVDEQMTMKTKQRMLTEDWELFKQRRFIEEQLTNKKAVTGENNFTDTMRHVLSSRLSMPDCPNCNYRRRCACDDCSLSHILTCGIMDPPVTDDIHIHQLPLQVDPAPDYLAERSPPSVSSASSGSGSSSPITIQQHPRLILTDSGSAPTFCSDDEDVAPLSAKFADIYPLSNYDDTEVVANMNGIHSELNGGGENMALKDESPQISSTSSSSSEADDEEADGESSGEPPGAPKEDGVLGSRSPRTEESKADSPPPSYPTQQAEQAPNTCECHVCKQEASGLTPSAMTAGALPPGHQFLSPEKPTHPALHLYPHIHGHVPLHTVPHLPRPLIHPTLYATPPFTHSKALPPAPVQNHTNKHQVFNASLQDHIYPSCFGNTPEWNSSKFISLWGSEVMNDKNWNPGTFLPDTISGSEILGPTLSETRPEALPPPSSNETPAVSDSKEKKNAAKKKCLYNFQDAFMEANKVVMATSSATSSVSCTATTVQSSNSQFRVSSKRPPSVGDVFHGISKEDHRHSAPAAPRNSPTGLAPLPALSPAALSPAALSPASTPHLANLAAPSFPKTATTTPGFVDTRKSFCPAPLPPATDGSISAPPSVCSDPDCEGHRCENGVYDPQQDDGDESADEDSCSEHSSSTSTSTNQKEGKYCDCCYCEFFGHGGPPAAPTSRNYAEMREKLRLRLTKRKEEQPKKMDQISERESVVDHRRVEDLLQFINSSETKPVSSTRAAKRARHKQRKLEEKARLEAEARAREHLHLQEEQRRREEEEDEEEEEDRFKEEFQRLQELQKLRAVKKKKKERPSKDCPKLDMLTRNFQAATESVPNSGNIHNGSLEQTEEPETSSHSPSRHMNHSEPRPGLGADGDAADPVDTRDSKFLLPKEVNGKQHEPLSFFFDIMQHHKEGNGKQKLRQTSKASSEPARRPTEPPKATEGQSKPRAQTESKAKVVDLMSITEQKREERKVNSNNNNKKQLNHIKDEKSNPTPMEPTSPGEHQQNSKLVLAESPQPKGKNKKNKKKKGDRVNNSIDGVSLLLPSLGYNGAILAHCNLRLPGSSDCAASASQVVGITDDVFLPKDIDLDSVDMDETEREVEYFKRFCLDSARQTRQRLSINWSNFSLKKATFAAH

SEQ ID NO: 15391 - protein, 64 aa, Homo sapiens
TRMIHITSVYSHPHQAQLRGCEVLRHKAHLVLPAWSTSCSGIPRGQQTAQQGYSRCFLAWSLEA

SEQ ID NO: 15392 - protein, 111 aa, Homo sapiens
  DOMAIN (87)..(104): BROMODOMAIN SIGNATURE domain identified by eMATRIX, accession number PR00503B, p-value=6.357e-13, raw score of 9.96
  DOMAIN (57)..(103): Bromo domain identified by PFam, accession name bromodomain, E-value=0.0007, PFam score of 18.3
  misc_feature (1)...(111): Xaa = X or * as defined in Table 2
TFFLYLENLNTAVRFWKLPYIHCFKNPGGAGLICIAPWLTKAFVFGSDYSCLVTVRVKXVFKPFLKDVEIRRFTWTIRQPWDAVFLRVPDYHALIKQPMDLETDXMRLANS

SEQ ID NO: 15393 - protein, 172 aa, Homo sapiens
  DOMAIN (31)..(53): Globins profile domain identified by eMATRIX, accession number BL01033A, p-value=2.929e-17, raw score of 16.94
  DOMAIN (9)..(172): Globin domain identified by PFam, accession name globin, E- value=7.5e-62, PFam score of 218.9
APSPDAMGHFTEEDKATITSLWGKVNVEDAGGETLGRLLVVYPWTQRFFDSFGNLSSASAIMGNPKVKAHGKKVLTSLGDATKHLDDLKGTFAQLSELHCIKHLDDLKGTFAQLSELHCDKLHVDPENFKLLGNVLVTVLAIHFGKEFTPEVQASWQKMVTGVASALSSRYH

SEQ ID NO: 15394 - protein, 877 aa, Homo sapiens
EKEPYEEISAEADREPQQLQNYWSEVRYTVRCIYRQAGTPLADDQDQSLVPDKEGVKELVDRLCERDPYQLYQRLEQQAREYVLEMKVRLLRQLSAAAKVKAPSGLQGPPQAHQFISLLLEEYGALCQAARSISTFLGTLENEHLKKFQVTWELHNKHLFENLVFSEPLLQSNLPALVSQIRLGTTTHDTCSEDTYSTLLQRYQRSEEELRRVAEEWLECQKRIDAYVDEQMTMKTKQRMLTEDWELFKQRRFIEEQLTNKKAVTGENNFTDTMRHVLSSRLSMPDCPNCNYRRRCACDDCSLSHILTCGIMDPPVTDDIHIHQLPLQVDPAPDYLAERSPPSVSSASSGSGSSSPITIQQHPRLILTDSGSAPTFCSDDEDVAPLSAKFADIYPLSNYDDTEVVANMNGIHSELNGGGENMALKDESPQISSTSSSSSEADDEEADGESSGEPPGAPKEDGVLGSRSPRTEESKADSPPPSYPTQQAEQAPNTCECHVCKQEASGLTPSAMTAGALPPGHQFLSPEKPTHPALHLYPHIHGHVPLHTVPHLPRPLIHPTLYATPPFTHSKALPPAPVQNHTNKHQVFNASLQDHIYPSCFGNTPEWNSSKFISLWGSEVMNDKNWNPGTFLPDTISGSEILGPTLSETRPEALPPPSSNETPAVSDSKEKKNAAKKKCLYNFQDAFMEANKVVMATSSATSSVSCTATTVQSSNSQFRVSSKRPPSVGDVFHGISKEDHRHSAPAAPRNSPTGLAPLPALSPAALSPAALSPASTPHLANLAAPSFPKTATTTPGFVDTRKSFCPAPLPPATDGSISAPPSVCSDPDCEGHRCENGVYDPQQDDGDESADEDSCSEHSSSTSTSTNQKEASSCTNK

SEQ ID NO: 15395 - protein, 765 aa, Homo sapiens
  DOMAIN (467)..(502): Matrix protein (MA) p15. domain identified by eMATRIX, accession number PF01140D, p-value=6.513e-10, raw score of 15.54
MGLLLKASSLASVTGFCLLQEGPQDQEVFYLLLFVNYFSAKQLLAYRCFVEMGSEILGPTLSETRPEALPPPSSNETPAVSDSKEKKNAAKKKCLYNFQDAFMEANKVVMATSSATSSVSCTATTVQSSNSQFRVSSKRPPSVGDVFHGISKEDHRHSAPAAPRNSPTGLAPLPALSPAALSPAALSPASTPHLANLAAPSFPKTATTTPGFVDTRKSFCPAPLPPATDGSISAPPSVCSDPDCEGHRCENGVYDPQQDDGDESADEDSCSEHSSSTSTSTNQKEGKYCDCCYCEFFGHGGPPAAPTSRNYAEMREKLRLRLTKRKEEQPKKMDQISERESVVDHRRVEDLLQFINSSETKPNGFVLVLAIMRAAADTPALSAGEPSFRRKEPSTVEMIEERPSCCDCSTLKSSAHTSQSYSRFRLTIGPDWEALGEKPCPVPQKTRDCWSAENTLEEKARLEAEARAREHLHLQEEQRRREEEEDEEEEEDRFKEEFQRLQELQKLRAVKKKKKERPSKDCPKLDMLTRNFQAATESVPNSGNIHNGSLEQTEEPETSSHSPSRHMNHSEPRPGLGADGDAADPVDTRDSKFLLPKEVNGKQHEPLSFFFDIMQHHKEGNGKQKLRQTSKASSEPARRPTEPPKATEGQSKPRAQTESKAKVVDLMSITEQKREERKVNSNNNNKKQLNHIKDEKSNPTPMEPTSPGEHQQNSKLVLAESPQPKGKNKKNKKKKGDRVNNSIDSKNLDPIIHGAFTDLLSPTTQ

SEQ ID NO: 15396 - protein, 1309 aa, Homo sapiens
  DOMAIN (975)..(1010): Matrix protein (MA) p15. domain identified by eMATRIX, accession number PF01140D, p-value=6.513e-10, raw score of 15.54
EKEPYEEISAEADREPQQLQNYWSEVRYTVRCIYRQAGTPLADDQDQSLVPDKEGVKELVDRLCERDPYQLYQRLEQQAREYVLEMKVRLLRQLSAAAKVKAPSGLQGPPQAHQFISLLLEEYGALCQAARSISTFLGTLENEHLKKFQVTWELHNKHLFENLVFSEPLLQSNLPALVSQIRLGTTTHDTCSEDTYSTLLQRYQRSEEELRRVAEEWLECQKRIDAYVDEQMTMKTKQRMLTEDWELFKQRRFIEEQLTNKKAVTGENNFTDTMRHVLSSRLSMPDCPNCNYRRRCACDDCSLSHILTCGIMDPPVTDDIHIHQLPLQVDPAPDYLAERSPPSVSSASSGSGSSSPITIQQHPRLILTDSGSAPTFCSDDEDVAPLSAKFADIYPLSNYDDTEVVANMNGIHSELNGGGENMALKDESPQISSTSSSSSEADDEEADGESSGEPPGAPKEDGVLGSRSPRTEESKADSPPPSYPTQQAEQAPNTCECHVCKQEASGLTPSAMTAGALPPGHQFLSPEKPTHPALHLYPHIHGHVPLHTVPHLPRPLIHPTLYATPPFTHSKALPPAPVQNHTNKHQVFNASLQDHIYPSCFGNTPEWNSSKFISLWGSEVMNDKNWNPGTFLPDTISGSEILGPTLSETRPEALPPPSSNETPAVSDSKEKKNAAKKKCLYNFQDAFMEANKVVMATSSATSSVSWTANTVQSSNSQFRVSSKRPPSVGDVFHGISLGDQKNSAPAAPRNSPTGLAPLPALSPAALSPAALSPASTPHLANLAAPSFPKTATTTPGFVDTRKSFCPAPLPPATDGSISAPPSVCSDPDCEGHRCENGVYDPQQDDGDESADEDSCSEHSSSTSTSTNQKEGKYCDCCYCEFFGHGGPPAAPTSRNYAEMREKLRLRLTKRKEEQPKKMDQISERESVVDHRRVEDLLQFINSSETKPVSSTRAAKRARHKQRKLEEKARLEAEARAREHLHLQEEQRRREEEEDEEEEEDRFKEEFQRLQELQKLRAVKKKKKERPSKDCPKLDMLTRNFQAATESVPNSGNIHNGSLEQTEEPETSSHSPSRHMNHSEPRPGLGADGDAADPVDTRDSKFLLPKEVNGKQHEPLSFFFDIMQHHKEGNGKQKLRQTSKASSEPARRPTEPPKATEGQSKPRAQTESKAKVVDLMSITEQKREERKVNSNNNNKKQLNHIKDEKSNPTPMEPTSPGEHQQNSKLVLAESPQPKGKNKKNKKKKGDRVNNSIDDVFLPKDIDLDSVDMDETEREVEYFKRFCLDSARQTRQRLSINWSNFSLKKATFAAH

SEQ ID NO: 15397 - protein, 150 aa, Homo sapiens
  misc_feature (1)...(150): Xaa = X or * as defined in Table 2
GVPYKRHIEGFXPGLNGPLKFNGPSSSSSSDGLLRLFSGGSGGQSPNWVPLGSYQGRSRPVPPGGSSAEPFPPSPASGGTHVPQLRALPPLHGHSAAHPHLSLALTVPPPVVRTLXGHWGPGPPTLDAPPSPSHLQVPLSSQGGIPPHWT

SEQ ID NO: 15398 - protein, 96 aa, Homo sapiens
  misc_feature (1)...(96): Xaa = X or * as defined in Table 2
GENPLMRWPEALPGVFKTCFSPPTXGYGGGLMFLCHHADSINFSAFQPINNADFIVPIEIEGTTHQVSCQPDHTQPRGWGVCLLPHLYWGPPPISG

SEQ ID NO: 15399 - protein, 221 aa, Homo sapiens
  misc_feature (1)...(221): Xaa = X or * as defined in Table 2
RIFSLCSAALSKKHGNPQDCSRRAPGNVPAAISRAPSLVLGLRARTVTRKGGLRPRKGEQGPIPSPSDPAVKGPGAEPGQARFAPVYQILIGAPRWEPLLSTGGYTVSGSSPVVEVGTRANQPRQXALPASHLPPLASRSSSSSHLYTAAPPLVSRGSGGSAGRALDSSFPQHSLAKPRPSAGLEAPGHWGRTGGDRRRKGTGGEPHTFAEVEALPASARP

SEQ ID NO: 15400 - protein, 86 aa, Homo sapiens
  misc_feature (1)...(86): Xaa = X or * as defined in Table 2
FGPGPPLXSPLFXGSSSSHSGVGKXNPSFLPGGTPVFFKNPKFPPPWGGPPVSPLFWGGETGNWGNPGGGTLEGPGYPPLALPGGK

SEQ ID NO: 15401 - protein, 103 aa, Homo sapiens
  misc_feature (1)...(103): Xaa = X or * as defined in Table 2
DWRRRRRDSRSSXREDCQSTIYVRKRAKSNCWCWSKEKSKSHERDSIPIRIEEKRMRSRSKGRDHENVKEKEKQSDSIGNDQEGSRSREKSNQFDSKSNERDH

SEQ ID NO: 15402 - protein, 751 aa, Homo sapiens
  DOMAIN (192)..(223): Protein kinases ATP-binding region proteins domain identified by eMATRIX, accession number BL00107A, p-value=4.750e-27, raw score of 18.39
  DOMAIN (77)..(691): Eukaryotic protein kinase domain identified by PFam, accession name pkinase, E-value=8.6e-196, PFam score of 663.8
AAQGRRRARVTWRRQMPLAQLKEPWPLMELVPLDPENGQTSGEEAGLQPSKDEGVLKEISITHHVKAGSEKADPSHFELLKVLGQGSFGKVFLVRKVTRPDSGHLYAMKVLKKATLKVRDRVRTKMERDILADVNHPFVVKLHYAFQTEGKLYLILDFLRGGDLFTRLSKEVMFTEEDVKFYLAELALGLDHLHSLGIIYRDLKPENILLDEEGHIKLTDFGLSKEAIDHEKKAYSFCGTVEYMAPEVVNRQGHSHSADWWSYGVLMFEMLTGSLPFQGKDRKETMTLILKAKLGMPQFLSTEAQSLLRALFKRNPANRLGSGPDGAEEIKRHVFYSTIDWNKLYRREITPPFKPAVAQPDDTFYFDTEFTSRPPYESSWQPPPELGPNTWFWGVPSVATGLMEDDGKPRAPQAPLHSVVQQLHGKNLVFSDGYVVKETIGVGSYSECKRCVHKATNMEYAVKVIDKSKRDPSEEIEILLRYGQHPNIITLKDVYDDGKHVYLVTELMRGGELLDKILRQKFFSEREASFVLHTIGKTVEYLHSQGVVHRDLKPSNILYVDESGNPECLRICDFGFAKQLRAENGLLMTPCYTANFVAPEVLKRQGYDEGCDIWSLGILLYTMLAGYTPFANGPSDTPEEILTRIGSGKFTLSGGNWNTVSETAKDLVSKMLHVDPHQRLTAKQVLQHPWVTQKDKLPQSQLSHQDLQLVKGAMAATYSALNSSKPTPQLKPIESSILAQRRVRKLPSTTL

SEQ ID NO: 15403 - protein, 615 aa, Homo sapiens
  DOMAIN (224)..(255): Protein kinases ATP-binding region proteins domain identified by eMATRIX, accession number BL00107A, p-value=4.750e-27, raw score of 18.39
  DOMAIN (158)..(545): Eukaryotic protein kinase domain identified by PFam, accession name pkinase, E-value=4.3e-91, PFam score of 316.0
MAEGDAKGDKAKVKDEKPAPPKPEPKPKKAPAKKGEKVPKGKKGKADAGKEGNNPAENGDAKTDQEGPAAQLQGVWTADSLQLSAPGLASDADSLLAQDHILPHPSSSFPRAAPIRKRFTTITWFSHINCSLRTGHDDNGGFVEQKGGKVRDRVRTKMERDILADVNHPFVVKLHYAFQTEGKLYLILDFLRGGDLFTRLSKEVMFTEEDVKFYLAELALGLDHLHSLGIIYRDLKPENILLDEEGHIKLTDFGLSKEAIDHEKKAYSFCGTVEYMAPEGSALMSPGGCFRAKLGMPQFLSTEAQSLLRALFKRNPANRLGSGPDGAEEIKRHVFYSTIDWNKLYRREIKPPFKPAVAQPDDTFYFDTEFTSRTPKDSPGIPPSAGAHQLFRGFSFVATGLMEDDGKPRAPQAPLHSVVQQLHGKNLVFSDGYVVKETIGVGSYSECKRCVHKATNMEYAVKVIDKSKRDPSEEIEILLRYGQHPNIITLKDVYDDGKHVYLVTELMRGGELLDKILRQKFFSEREASFVLHTIGKTVEYLHSQGEWKWALRPNYLRSCWLGRYPLSLRGSNSDSPSQLEFPSNKCSAPLRGSERGVGGAAAAGAVGTRAERHKN

SEQ ID NO: 15404 - protein, 172 aa, Homo sapiens
  DOMAIN (31)..(53): Globins profile domain identified by eMATRIX, accession number BL01033A, p-value=2.929e-17, raw score of 16.94
  DOMAIN (9)..(147): Globin domain identified by PFam, accession name globin, E- value=2.3e-55, PFam score of 197.4
APSPDAMGHFTEEDKATITSLWGKVNVEDAGGETLGRLLVVYPWTQRFFDSFGNLSSASAIMGNPKVKAHGKKVLTSLGDAIKHLDDLKGTFAQLSELHCDKLHVDPENFKLLGNVLVTVLAIHFGKEFTPEVQASWQKMVTGVVGQGECGRCWRRNPGKAPGCLPMDPEVL

SEQ ID NO: 15405 - protein, 146 aa, Homo sapiens
  DOMAIN (72)..(127): Speract receptor repeat proteins domain proteins domain identified by eMATRIX, accession number BL00420B, p-value=3.778e- 21, raw score of 22.67
  DOMAIN (72)..(146): Scavenger receptor cysteine-rich domain identified by PFam, accession name SRCR, E-value=1.7e-05, PFam score of 31.7
  misc_feature (1)...(146): Xaa = X or * as defined in Table 2
SEPPXITSVDPRVRGNASTGYGKIWLDDVSCDGDESDLWSCRNSGWGNNDCSHSEDVGVICSDASDMELRLVGGSSRCAGKVEVNVQGAVGILCANGWGMNIAEVVCRQLECGSAIRVSREPHFTERTLHILMSNSGCTGGEASLW

SEQ ID NO: 15406 - protein, 74 aa, Homo sapiens
  misc_feature (1)...(74): Xaa = X or * as defined in Table 2
QNESVVHMKTFLAVFKLPLKIRQIKCIYIFYNXELKLYSVILKYFFLYDFRPVCLVLSEIPFMSTWFLLVSTFR

SEQ ID NO: 15407 - protein, 127 aa, Homo sapiens
  DOMAIN (24)..(34): Ubiquitin carboxyl-terminal hydrolases family 2 proteins domain identified by eMATRIX, accession number BL00972B, p-value= 8.269e-10, raw score of 9.45
  misc_feature (1)...(127): Xaa = X or * as defined in Table 2
EKGPLSPKVLFNHLCQKAPRFKDFQQQDSQELLHYLLDAGRTEXTKRIQASILKAFNNPTTKTADDETRKKVKTYGKEGVKMNFIDRIFIGELTSTVMCEECANISTVKDPFIDISLPIIEERVSKP

SEQ ID NO: 15408 - protein, 87 aa, Homo sapiens
  misc_feature (1)...(87): Xaa = X or * as defined in Table 2
KCRSRNXTAXFHRLNAKALSLLTLLNVYQKKHLVEILSYHNCDSQTRNAPELDCLIRLQAQNIQQRHIVFLTGKESTPKLSTMNIGM

SEQ ID NO: 15409 - protein, 89 aa, Homo sapiens; identical to SEQ ID NO: 15179
  misc_feature (1)...(89): Xaa = X or * as defined in Table 2

SEQ ID NO: 15410 - protein, 104 aa, Homo sapiens; identical to SEQ ID NO: 15180
  misc_feature (1)...(104): Xaa = X or * as defined in Table 2

SEQ ID NO: 15411 - protein, 69 aa, Homo sapiens
  misc_feature (1)...(69): Xaa = X or * as defined in Table 2
FPPICYLLEIGSHSVVQAGVQWHRHSAQYPXIHEHKQSSCVSLMSSXHYSHVPPSPGNILLLXRRGSCV

SEQ ID NO: 15412 - protein, 115 aa, Homo sapiens
  DOMAIN (44)..(56): MOLLUSCAN RHODOPSIN C-TERMINAL TAIL SIGNATURE domain identified by eMATRIX, accession number PR00239E, p-value=8.977e- 09, raw score of 1.58
  misc_feature (1)...(115): Xaa = X or * as defined in Table 2
AGVPPGNPPLWGGEGGGSPRGGGLKPGFPQRGNPFFFKKSQPTPPGGGPPLIPPPWGGGAGGSPLPQGQRFQXTKIGPFPSPRGKKKKPPFPKKKKKKKKRKEKSEMPGFMVLNA

SEQ ID NO: 15413 - protein, 72 aa, Homo sapiens
  misc_feature (1)...(72): Xaa = X or * as defined in Table 2
MGSFQSHHTKWQSXXXXXXXXXXXXXXXXXXXXXXXXXXXXXXXXXXXXXXXXXXXXXXXXPGGGPGAQFPL

SEQ ID NO: 15414 - protein, 69 aa, Homo sapiens
  misc_feature (1)...(69): Xaa = X or * as defined in Table 2
MGSFQSHHTKWQSXXXXXXXXXXXXXXXXXXXXXXXXXXXXXXXXXXXXXXXXXXXXXXXXTGGGPAPI

SEQ ID NO: 15415 - protein, 91 aa, Homo sapiens
  DOMAIN (18)..(46): !!!! PROTEIN ALU SUBFAMILY WARNING ENTRY NUCLEAR PHOSPHO domain identified by eMATRIX, accession number PD02454B, p-value= 5.950e-20, raw score of 11.61
  misc_feature (1)...(91): Xaa = X or * as defined in Table 2
LISVIPALWEAKAEDHMRSGVQDQPGQRGKTPSLRKIHRLARHGGMHLXSQLLGRLKHKNRLNPGGKSCSEPRSHHCSSAWATDQDSVSKK

SEQ ID NO: 15416 - protein, 128 aa, Homo sapiens
  misc_feature (1)...(128): Xaa = X or * as defined in Table 2
MKSRVIGWASGLKNEIFFFFFFFFWRDRYRAMLPRLVLNLLFLIEPPVSILVKHWDYRHEPPPPRXRLPFCMMRLEGPHCFRDFATIYKKQSVRTVAGLFSCLIKFSAHTNLDQRIWDLNPISGYFPN

SEQ ID NO: 15417 - protein, 232 aa, Homo sapiens
  misc_feature (1)...(232): Xaa = X or * as defined in Table 2
HSKGSQVQSPGPEPSSAGPKPGAQPQPTWGLAAPEEGREGGKCGRHCRNSKPLSQPCAGVWSGRGAEEGGAGPDHPARPTGPPSSPSCSAGLPDLXXGLKPPLEASSMDPGFVLEGGPRVREGVCQDGIXAXELEEVPSPGGSATSGAATLSDRRGGNGASQARLPXPSHWLPRAKXAPQGXASPGSPTACPAHPHSWKGGSAGPGMGRGRVVGDRGGAWGTGSHCNPTPSS

SEQ ID NO: 15418 - protein, 119 aa, Homo sapiens
  misc_feature (1)...(119): Xaa = X or * as defined in Table 2
SFTCCFQMHTKLLCLNTLCNTFLSTGAFFLIVLTWLSPIAVRLSLNVISERPFLFILSVVDPCAHILYLSLLFVSXVLPQYVIALFVPHKRMXETMYACLPVCPXLLTACLEHNCSIFI

SEQ ID NO: 15419 - protein, 436 aa, Homo sapiens
  DOMAIN (201)..(225): RHODOPSIN-LIKE GPCR SUPERFAMILY SIGNATURE domain identified by eMATRIX, accession number PR00237E, p-value=6.294e-09, raw score of 13.03
  misc_feature (1)...(436): Xaa = X or * as defined in Table 2
EGLRGTALLLTGGGRGPXGQPQQPGGPASSPSPAAPGPAAAEPACSTALWPTVSLRAPSPCPPQRAGQGYGSWGGEPGNSMASGGDGEPLSQGLAPAGTPGLARLQGPGHWAVSLWPSLRGFPGGPQTGQSPLSQPHSALTGRGRSPGALGPPPPQRPHQRPAPDPARPQRXTPLTAGATTRPQHLPQGNCRCSLLLLFLLLLFFLLLFLFLLFFFLILFFLFLIFLLLLLFLLPISLRLNRSQWDLGGGEQHVREAHPPDPVEQPRPFSVIGEVSFEVLVGQTQRHSSWEAIHLKWGRHGEHLGLEVIGPLPNPRKAWMPHLLQLGPRDAEHRGHESVVASSEGRVAPVGRPHRAALSRAAALNEGTGGARGAAAAGVRVMLRLQRGGGEHGGRQSSQGAVPREGVPRESVLLQLSLWACGVRLSPSRAGSRVQG

SEQ ID NO: 15420 - protein, 160 aa, Homo sapiens
  misc_feature (1)...(160): Xaa = X or * as defined in Table 2
KQPPPHGESAAWAATSRPGWWLLCRPAEGRTPGWTAFDVHPTLMQKLPEHSGNFSGQSPPCQLEALPRPSTCPLGSSRGSGREGPLPPTXELFPNGQSVRCQVGGPGYDSWCPGPGPAPCPPTEPXMXGPQALTSAPGPNKHPGLELGGRRGPERAPGPF

SEQ ID NO: 15421 - protein, 115 aa, Homo sapiens
  misc_feature (1)...(115): Xaa = X or * as defined in Table 2
KALACPPTCCVLGVHHAVSAGGFPGHRPLVRRHIAPAGHQVTLSFLHPTLCCHPKSNCTPCGSRRAVPTPTPLPAPGPQAFCPVPGSHWLAWSPRGRSPPTSVAPTQPYXQPPSC

SEQ ID NO: 15422 - protein, 119 aa, Homo sapiens
  misc_feature (1)...(119): Xaa = X or * as defined in Table 2
HEGTVQQPQARGLYEDLLMSEGENDEDDAGSDDNGDNIFSAIHLSESGRDSDAXFGGIRPKQSRMLKENTRMVMDNEERLLFYEGDCGEASHGLEDSCLSYGSYEDPDPKWNTQNTSFC

SEQ ID NO: 15423 - protein, 140 aa, Homo sapiens; identical to SEQ ID NO: 8052
  DOMAIN (87)..(99): Globins profile domain identified by eMATRIX, accession number BL01033B, p-value=7.000e-14, raw score of 13.81
  DOMAIN (14)..(140): Globin domain identified by PFam, accession name globin, E- value=1.3e-37, PFam score of 135.6

SEQ ID NO: 15424 - protein, 150 aa, Homo sapiens
  DOMAIN (34)..(56): Globins profile domain identified by eMATRIX, accession number BL01033A, p-value=7.000e-20, raw score of 16.94
  DOMAIN (10)..(150): Globin domain identified by PFam, accession name globin, E- value=4.1e-49, PFam score of 175.7
PQTQREPTMVLSPADKTNVKAAWGKVGAHAGEYGAEALERMFLSFPTTKNYFPHFDLSHGSAQVKGHGKKVADALTNAVAHVDDMPNALSALSDLHAHKLRVDPVNFKLLSHCLLVTLAAHLPAEFTPAVHASLDKILASVSTVLTSKYR

SEQ ID NO: 15425 - protein, 64 aa, Homo sapiens
  misc_feature (1)...(64): Xaa = X or * as defined in Table 2
RQGSCSVTQPGVQWNNLGLLXPXPPGLKQSSYLSSPSSWDYRCVPTRLANSYFKFIXYVFFCLF

SEQ ID NO: 15426 - protein, 38 aa, Homo sapiens
  misc_feature (1)...(38): Xaa = X or * as defined in Table 2
RWPLWSFIIETKRRTLXSQLLRRLRQENLLNLGGGGCS

SEQ ID NO: 15427 - protein, 115 aa, Homo sapiens
  misc_feature (1)...(115): Xaa = X or * as defined in Table 2
LFAQPNPVTFKIRIYCMSKDIIDKVRARPPEWEKICANHVYNKGLGSRIYKVLLLEXKNIVRLNQKANAQFYAGYKLRCYRKFSNKSIVNEXKVLLFMRXEYIPVSTHFICCVIL

SEQ ID NO: 15428 - protein, 154 aa, Homo sapiens
  DOMAIN (16)..(28): GTP-binding elongation factors proteins domain identified by eMATRIX, accession number BL00301A, p-value=3.842e-13, raw score of 12.41
  DOMAIN (12)..(150): Elongation factor Tu family domain identified by PFam, accession name GTP_EFTU, E-value=2.4e-42, PFam score of 145.4
KLPLKAKMGKEKTHINIVVIGHVDSGKSTTTGHLIYKCGGIDKRTIEKFEKEAAEADCAVLIVAAGVGEFEAGICKNGQTREHALLAYTLGVKQLIVGVNKMDSTEPPYSQKRYEEIVKEVSTYIKKIGYNPDTVAFVPISGWNGDNMLEPSAN

SEQ ID NO: 15429 - protein, 204 aa, Homo sapiens
  DOMAIN (90)..(122): GTP-binding elongation factors proteins domain identified by eMATRIX, accession number BL00301B, p-value=5.500e-31, raw score of 20.09
  DOMAIN (5)..(156): Elongation factor Tu family domain identified by PFam, accession name GTP_EFTU, E-value=4.7e-88, PFam score of 299.4
  misc_feature (1)...(204): Xaa = X or * as defined in Table 2
MGKEKXHINIVVIGHVDSGKSTTTGHLIYKCGGIDKRTIEKFEKEAAEMGKGSFKYAWVLDKLKAERERGITIDISLWKFETSKYYVTIIDAPGHRDFIKNMITGTSQADCAVLIVAAGVGEFEAGISKNGQTREHALLAYTLGVKQLIVGVNKMDSTGIAILTGDFPSLEPRHVSTWLQHVVTIPTRNWHKCYCVGVVANFLN

SEQ ID NO: 15430 - protein, 474 aa, Homo sapiens
  DOMAIN (16)..(28): GTP-binding elongation factors proteins domain identified by eMATRIX, accession number BL00301A, p-value=4.000e-12, raw score of 12.41
  DOMAIN (12)..(448): Elongation factor Tu family domain identified by PFam, accession name GTP_EFTU, E-value=2e-88, PFam score of 300.6
  misc_feature (1)...(474): Xaa = X or * as defined in Table 2
KLPLKAKMGKEKTYINLAVIGHVDSGKSTTTGHLIYKCGGIDKRTIEKFEKEAAEMGKGSFKYAWVLDKLKAERERGITIDISLWKFETSKYYVTIIGAPGHRDFIKNMITGTSQADWCCPELLLLGVGEFEAGISKNGQTREHALLAYTLGVKQLIAGANKMDSTEPPYSQKRYEEIVKEVSTYIKKIGYNPATVAFVPISGWNGDNMLEPSANMPWFKGWKVSRKDWQCQLGTTLLEALDCILPPTRPTDKLLRLAFQDAXQNGGIGTVPVGRVETGVLKPGMGVTFAPVNVYNGKXKSVEMHHEAFECKLFPGDKCGAFNVKNVSVKDVRRGNVAGDSKNDPPMEAAGFTAQVIILNHSGQISAGYAPVLDCHTAHIACKFAELKEKIDRRSGKKLEDGPKFLKSGDAAIVDMVPGKPMCVESFSDYPPLGCFAVRDMRQTVAVGVIKAVDKKAAGAGKVTKSAQKAQKAK

SEQ ID NO: 15431 - protein, 101 aa, Homo sapiens
  DOMAIN (45)..(62): Zinc finger C2H2 type, domain proteins. domain identified by eMATRIX, accession number BL00028, p-value=1.000e-12, raw score of 16.07
  DOMAIN (43)..(93): Zinc finger, C2H2 type domain identified by PFam, accession name zf-C2H2, E-value=7.9e-08, PFam score of 39.4
  misc_feature (1)...(101): Xaa = X or * as defined in Table 2
RFTGHYRMLSGEKPYEWIEWGKRLSSNTALTQHQRIHTGENPFECKECGKAFNQKITLIQHQRVHTGEKPYECXACGKTFRWGGRFILHQNLPTQKTPVQA

SEQ ID NO: 15432 - protein, 121 aa, Homo sapiens; identical to SEQ ID NO: 12127
  misc_feature (1)...(121): Xaa = X or * as defined in Table 2

SEQ ID NO: 15433 - protein, 78 aa, Homo sapiens
MGIMSVPPHPQNVDYPLDGEKILHILGFNPEIQLWEILFEQDNGRAISWPLLILGFPLYSVPIGHQGRQLGRRNLGRS

SEQ ID NO: 15434 - protein, 79 aa, Homo sapiens
  misc_feature (1)...(79): Xaa = X or * as defined in Table 2
HRIRPICSPQYMEKVYVTKNNNYRILEIDMNFFFPPETEGVGGQVLEVMPHEELKPSIFFFFXDRVSLCHPGWSAVVQS

SEQ ID NO: 15435 - protein, 43 aa, Homo sapiens
  DOMAIN (9)..(30): kw TRANSCRIPTASE REVERSE II ORF2 domain identified by eMATRIX, accession number DM01354S, p-value=4.071e-12, raw score of 11.61
  misc_feature (1)...(43): Xaa = X or * as defined in Table 2
TESLYLNTIKATYEKFTANITLNNEMLKAFSLRLDTRXEHSLS

SEQ ID NO: 15436 - protein, 223 aa, Homo sapiens
  misc_feature (1)...(223): Xaa = X or * as defined in Table 2
GYINNGGRKRRTELKPTEPRSCRAEGGGVEGGPPACPPPTNCLQRLQPHLGSCTEISGQEREXGYINNGGRKRRTELKPTEPRSCRAEGGGVEGGPPACPPPTNCLQRLQPHLGSCTEISGQERESGGGEGNSGPSNNRVHGFSKAGHGLGVGEEEEERQLWLXTGRKQRPNIPIRRLPQASLHLPPASPCQPAVPGALSSPRRWPQPPASHSCPSPPRHTKS

SEQ ID NO: 15437 - protein, 99 aa, Homo sapiens
  DOMAIN (14)..(42): !!!! PROTEIN ALU SUBFAMILY WARNING ENTRY NUCLEAR PHOSPHO domain identified by eMATRIX, accession number PD02454B, p-value= 5.345e-21, raw score of 11.61
  misc_feature (1)...(99): Xaa = X or * as defined in Table 2
SQHFGRLWQVNHLRSGAPAQPGQQGKTPYLLKIQKLAGRDGARLXSQLLRRLRQENRLNLGGGGCSEPRSCHCTPAWVTKRDSFSKTNKQTENNKKRIL

SEQ ID NO: 15438 - protein, 133 aa, Homo sapiens
  misc_feature (1)...(133): Xaa = X or * as defined in Table 2
ILVLDPPPQPPKLLSVKGNPEDFIFRQFFFSPYPLFPFPPFSYAKPPVSNETPFPPHPRFSKLLSQGPADMPPLPGSLPXLLHYSACMLHHLLFCSLAHCAFRLLSCQGCQYLHGLMHMFRSGHMHIYAAGRV

SEQ ID NO: 15439 - protein, 115 aa, Homo sapiens
  misc_feature (1)...(115): Xaa = X or * as defined in Table 2
CVYTFICXEISGLFPVWGXYRKXGSSSSSSSSSSSSSSSSHFNKYSSCMFNFFXNCXTVLQSGCTILLLHHWCMRVLSPPXCQQHLAVFFSIIAILLSVXLHLTVIFICIPQITS

SEQ ID NO: 15440 - protein, 135 aa, Homo sapiens
  misc_feature (1)...(135): Xaa = X or * as defined in Table 2
DGSSLCRPGWSAEQDCVSSGGEKKKKGRDNIEDEACSSRPSRXLFEENIHLVHALIEEDQLANIIDISAGSAYTILDEKLTLSKRFTRWVPKPLPSDQLQTRAEFLMEILNGWDQDPEAFLQRIVTGDETXFYQR

SEQ ID NO: 15441 - protein, 112 aa, Homo sapiens
  DOMAIN (50)..(81): Protein kinases ATP-binding region proteins domain identified by eMATRIX, accession number BL00107A, p-value=5.636e-09, raw score of 18.39
  misc_feature (1)...(112): Xaa = X or * as defined in Table 2
IPKPMAKLPFMKYRDLHTNLLYSRMETGPKHIPMKTLLKIMEDIALGMDNLSLMNYLYLELTARNCMERDDMTDCEADFGLSRKRYSGENYLHCRIANRPVXGSAIESLAHR

SEQ ID NO: 15442 - protein, 125 aa, Homo sapiens
  DOMAIN (1)..(124): Spectrin repeat domain identified by PFam, accession name spectrin, E-value=5.4e-18, PFam score of 70.3
  misc_feature (1)...(125): Xaa = X or * as defined in Table 2
LIKKHVDFDLATNVQEEKIAALEDFADQLITAGHYAKGDIFSRRNEVLDRWRRVKTQMIEKRAXVXKSQTLQQFNRDVDENEAWISEKLHTASDDSYKDPTNIQLCKLLSKHQKHQAFXTELPAT

SEQ ID NO: 15443 - protein, 69 aa, Homo sapiens
  misc_feature (1)...(69): Xaa = X or * as defined in Table 2
SSSSLPLHITNNPLHQQPLPPQLPAYTGAEGDPCALLSXYCLIHLLNTEAVNNIITFLGKQPCKRYDKV

SEQ ID NO: 15444 - protein, 88 aa, Homo sapiens
  misc_feature (1)...(88): Xaa = X or * as defined in Table 2
RSPKTHGGGRRWGMVRPGTAPTPCCPHRPQLPCQPLLGPPEXSLLEGRSSSLDSGMEESQTHAAPACRTWCSDGPRXPWMGPAARCSG

SEQ ID NO: 15445 - protein, 93 aa, Homo sapiens
  misc_feature (1)...(93): Xaa = X or * as defined in Table 2
LFLWRRQLTLTENPRWWPTLGDGQARDCSDACCPHRPQLPSSHCSQTKSSPIPEVPRPPKHRXGGVCAGPSHLPGGPGSSPSPPCPWPGSGLF

SEQ ID NO: 15446 - protein, 186 aa, Homo sapiens
  misc_feature (1)...(186): Xaa = X or * as defined in Table 2
EPPRGAEQGGVPGGKGPETSAAPAPTPAREPERVPGGAPPAPECACAELVAAPAPAGGSLPAGPRPWERPRWAAGAPQGDKGPGEAATSPARGDSGVEPRGGGVPLPRHAGPQARRCEPTLPHDLYSGQVQPEHRAAGLHPRSSGTIXAPCTTCRAAXVXDSSIPESREELRPSKKRSFRRSEKEK

SEQ ID NO: 15447 - protein, 138 aa, Homo sapiens
  DOMAIN (81)..(95): C2H2-TYPE ZINC FINGER SIGNATURE domain identified by eMATRIX, accession number PR00048A, p-value=1.000e-11, raw score of 10.52
  DOMAIN (1)..(132): Zinc finger, C2H2 type domain identified by PFam, accession name zf-C2H2, E-value=3.6e-13, PFam score of 57.2
  misc_feature (1)...(138): Xaa = X or * as defined in Table 2
VTCGKAFAQKAQLIVHQIIHTGKKPYDCGACGKDFREKVHLVRHQRTHTGEKPYDRSERGKAFSHKSDLIIHHRVHTGEKPYECCECGIAFSQKSPLIIHCRIHTGERPYECIKCGKAFYHKXQLSIAHRAHTGDIAG

SEQ ID NO: 15448 - protein, 84 aa, Homo sapiens
  DOMAIN (14)..(42): !!!! PROTEIN ALU SUBFAMILY WARNING ENTRY NUCLEAR PHOSPHO domain identified by eMATRIX, accession number PD02454B, p-value= 8.442e-24, raw score of 11.61
  misc_feature (1)...(84): Xaa = X or * as defined in Table 2
SQHFGRPRRADHLRSGDRDHPAQHGETPSLLKRQKLASHGGRHLXSXLLWRLRQENHLNPGWGGCSELRWRHCTPAWATSKNSF

SEQ ID NO: 15449 - protein, 64 aa, Homo sapiens
  misc_feature (1)...(64): Xaa = X or * as defined in Table 2
LIKKLASCGGEHLYSXLLKRLRWENXSSLGVXGCGELXSQHCTPTWVMEXGPAQKHKNKTKKLL

SEQ ID NO: 15450 - protein, 59 aa, Homo sapiens
  misc_feature (1)...(59): Xaa = X or * as defined in Table 2
ICQPLSLSSTANHPVLCLCFTHKNLHIFIAALFIIAKSWKQPXCTSVDEWIWLGLAPLY

SEQ ID NO: 15451 - protein, 107 aa, Homo sapiens
  misc_feature (1)...(107): Xaa = X or * as defined in Table 2
FFFFFXDRVSLLLPKLECNGTISAHCNLRLPGSSDSPASASSSFFTIHVAPLPQLRHYXIFYDGTRSLYAGXYSQNLLIYSAPRQPQYHFKDMNKILDSIQRSYTKI

SEQ ID NO: 15452 - protein, 84 aa, Homo sapiens
  misc_feature (1)...(84): Xaa = X or * as defined in Table 2
QFFRNTIFFXDRVSLLLPKLECNSAISAHHNLCLPGSSDSPASASRVAGITGTCHHTRLLFVFLVETGFYHVSQSGLELLTSGD

SEQ ID NO: 15453 - protein, 85 aa, Homo sapiens
  misc_feature (1)...(85): Xaa = X or * as defined in Table 2
LIVKMPFLKXSWKIFXMSKXXVMLIHXGFVFLFVCFFXDRVSLLLPRLECNGPISAHRNLHLPDSSDSPASAYIKGFVRQLSHEE

SEQ ID NO: 15454 - protein, 65 aa, Homo sapiens
  misc_feature (1)...(65): Xaa = X or * as defined in Table 2
TKGGGYTQRTAIQFILFIYLFIYXDGVSLLLPRLEXNGAISAHCNLHLPGSSDSQKKTKKNFCTQ

SEQ ID NO: 15455 - protein, 317 aa, Homo sapiens
  misc_feature (1)...(317): Xaa = X or * as defined in Table 2
ISFHLSTFGAPSFFFFFEMEFSLLLPRLECNGAISAHRNLRLPGSSDSPASASPVGWDYRHVHPRSANFVFFFSRDGVSPCWSGLVSNSRPQMIPPSRPPKVLDTGLATMPGLCLANFCGRNRVSLMCPSWSPELKQSTCLSLPKCWDYRRAAVPGLFILFFLRHRCPTLTQDEVQWCDHSSLQPSTPEIKHPPASASQSSWDQRHAPLHLANFYFYFXFFETESHSVTRLECSGAILAHCNLCLPGSSYSPAPASXVAGTTGAHRRLANFFVFLVEMGFHHVRQVDARSLDLVICLPRPPKVLGLQDVSHHRPAYF

SEQ ID NO: 15456 - protein, 156 aa, Homo sapiens
  misc_feature (1)...(156): Xaa = X or * as defined in Table 2
FFFLFXEGVSLLLPRLECSGAISAHCNLHLPGSSDSPASASQEDGITGVRYHAWLILVFLVEIGFHHVGQADLKPXPQVIHPPLFFFFLRQSFALVAQAGVQWCDLSSLQTPPPRVQGILLAQPPEYLVAGFTGMRHHTRLFFFFAFLVETGFHPC

SEQ ID NO: 15457 - protein, 16 aa, Homo sapiens
EEEEEEEEEEEEEDQE

SEQ ID NO: 15458 - protein, 61 aa, Homo sapiens
  misc_feature (1)...(61): Xaa = X or * as defined in Table 2
MDHLYNXXXXXXXXXXXXXXXXXXXXXXXXXEIQFXXXXERERNKNPFPAGDDIISRGVGQ

SEQ ID NO: 15459 - protein, 99 aa, Homo sapiens
  misc_feature (1)...(99): Xaa = X or * as defined in Table 2
GYQLPLQDELVLGQFLFQVSKIRFFSARKITCNSHFLLLKFFXFPHIICKXVSFSSERAAAADRAGASHPRIHHNLQRLQENSIRGPKYSSHTVSADAW

SEQ ID NO: 15460 - protein, 45 aa, Homo sapiens
  misc_feature (1)...(45): Xaa = X or * as defined in Table 2
NPVPPYPLCPALVFFLLLIYLLIYXPSPLLRMSAPAGKGFLFLSL

SEQ ID NO: 15461 - protein, 24 aa, Homo sapiens
GDFFFFLRDRVLLCHPGWNAVVQS

SEQ ID NO: 15462 - protein, 52 aa, Homo sapiens
RQVNMAEGIIHDTETKMEEFKDQLPADECNKLEEEISKMRELLARKDSETGE

SEQ ID NO: 15463 - protein, 716 aa, Homo sapiens
  DOMAIN (126)..(175): Heat shock hsp70 proteins family proteins domain identified by eMATRIX, accession number BL00297B, p-value=1.000e-40, raw score of 22.91
  DOMAIN (85)..(694): Hsp70 protein domain identified by PFam, accession name HSP70, E-value=0, PFam score of 1334.6
  misc_feature (1)...(716): Xaa = X or * as defined in Table 2
GFQKRCRHRIAQLFAVGALVCCLVLLHLSAMISASRAAAARLVGAAASRGPTAARHQDSWNGLSHEAFRLVSRRDYASEAIKGAVVGIDLGTTNSCVAVMEGKQAKVLENAEGARTTPSVVAFTADGERLVGMPAKRQAVTNPNNTFYATKRLIGRRYDDPEVQKDIKNVPFKIVRASNGDAWVEAHGKLYSPSQIGAFVLMKMKETAENYLGHTAKNAVITVPAYFNDSQRQATKDAGQISGLNVLRVINEPTAAALAYGLDKSEDKVIAVYDLGGGTFDISILEIQKGVFEVKSTNGDTFLGGEDFDQALLRHIVKEFKRETGVDLTKDNMALQRVREAAEKAKCELSSSVQTDINLPYLTMDSSGPKHLNMKLTRAQFEGIVTDLIRRTIAPCQKAMQDAEVSKSDIGEVILVGGMTRMPKVQQTVQDLFGRAPSKAVNPDEAVAIGAAIQGGVLAGDVTDVLLLDVTPLSLGIETLGGVFTKLINRNTTIPTKKSQVFSTAADGQTQVEIKVCQGEREMAGDNKLLGQFTLIGIPPAPRGVPQIEVTFDIDANGIVHVSAKDKGTGREQQIVIQSSGGLSKDDIENMVKNAEKYAEEDRRKKERVEAVNMAEGIIHDTETKMEEFKDQLPCADECNKLKEEISKMRELLARKDSETGENIRQAASSLQQASLKLFRNGLTKKMGSXAEEGSGSSGHWGNKREDSKGREKPVN

SEQ ID NO: 15464 - protein, 84 aa, Homo sapiens
NGVLAPAVQAGVQWRDPGSPPPPPPGFKRFFCLSLLSSWDYSHAPPRPANFVFLVEMRFLHVGQAGLELPTSGGLPALASQSAG

SEQ ID NO: 15465 - protein, 570 aa, Homo sapiens
MALWRGSAYAGFLALALTWRDRKKKFPGDDEAPGVKRTWAAGAGMRGRQWLRKRVEVVCTGRSANTVCAGVRAAGLVEKSPPPSLSRVGRRFRFCGDLDCPDRVLAEISTLAKMVECTGSTLGGGGYKKILKLTADAKFVEEHEGKKDIDSPTFLSSASSWWSSSSAYGSRRPGGFELKLIGQQGESGDVKATVAVLSFILSGAAKHSVDGKSLASELQQLGLPKEHAASPCCCYEEKQSPLQKHLRVCSLRTWSLAARVAEGTAETVDPSAAPKTSVWSSRVCWGRLLATISPSVNETDTCGMEDRRLVVCRPWRAQCHMKAWGWRHPEEGGTHSGAPSAVLQALAVAIQLGGHLADPLLQVDPLSSCGAVSLDILIYLVFYYRTASVPETYIVKTLFKKLESQSLIQSNVLTRSNSMKAERGEEAAKEKSEASRGWFMRFKERSCLHNIKMQGEAASADVEAAASYPKDLAKITDEHGYTKQQVRCIQNSLLLEGNAEEVRKIIVCSMSPPLKPGGPVTLVEEFLCASKASVSAVSGWISKWRNWQEIRRQEEREDRASLPDLQASES

SEQ ID NO: 15466 - protein, 1017 aa, Homo sapiens
  misc_feature (1)...(1017): Xaa = X or * as defined in Table 2
MRPGFVVSVGMVEGVPGEPDPYPVLCYTPWPGHDLPASRAALAQGRSWSLHRMIGQDSGRRRSRRQHFAPGTSSGLRSAPGLTRAGPAPPEAVSPSHVIVDSADLAGPEKEIPGPWLPRAMYEAPGVKRAWAAGAGMRGRQWLRKRVEVVCTGRSANTVCAGVRAAGLVEKSPPPSLSRMGRRFRFCGDLDCPDRVLAEISTLAKMVECTGSTLGGGGYKKILKLTADAKFVEEHEGKKDIDSPTFLSSASSWWSSSSAYGSRRPGGFELKLIGQQGESGDVKATVAVLSFILSGAAKHSVDGKSLASELQQLGLPKGAQAQPPPATSRASPFYPQSTRPARAAVMRRSKAPLQKHLRVCSLRTWSLAARVAEGTAETVDPSAAPKTSVWSSRVCWGRLLATISPSVNETDTCGMEDRRLGVQALACTVPHDGLGWRHPEEGGTHSGGSPLEHLEPKKLSLTFAIPGTRPLIMMKVDPNPLRGLKEQSEPILSPDARKGSSGDGEVQRNLVPAAVNPYVMIFLPALFRVLVLAAVFGQLKEYQQRKSPGIPAGAKTKKKKTDSSPETTTSGGCHSPGDSQYQELAVALESSSVTINQLNENIESLKQQKKQVEHQLEEAKKTNNEIHKAQMEQLETINILTLEKADLKTTLYHTKRAARHFEEESKDLAGRLQYSLQRIQELERALCAVSTQQQEEDRGHCLSSPDQNFSLFTIQSSSCREAVLQRRLQQTIKERALLNAHVTQVTESLKQVQLERDEYAKHIKGERARWQERMWKMSVEARTLKEEKKRDIHRIQELERSLSELKNQMAEPPSLAPPAVTSVVEQLQDEAKHLRQEVGRSGGKAPVPGGKQSGLESPXQGTKAETPGAGGDAPRAGGAESAGAGETVXTKREASGAAEDATGAGXEAAKAGAEATQTGGEAAKGGGEAAKAGKEAVGPGGEAVEEGGEATKAGGEARALPEPQARQAAGRATVQLRGSEQREKERTAVGAASKGAAGEARRGEGDAVHGHLSAADL

SEQ ID NO: 15467 - protein, 40 aa, Homo sapiens
EADQYLLWGPEPFPPTPDPEPTRLPLGESPAGADRAGGHP

SEQ ID NO: 15468 - protein, 114 aa, Homo sapiens
PEWVPPSSGWRQPQAFMWHCARQGLHTTSLLSSMPQVSVSFTEGEMVAKSLPQHTRLDHTEVLGAAEGSTVSAVPSATRAARDHVRRLQTRKCFCKGALLLLITAARAGRVLWG

SEQ ID NO: 15469 - protein, 425 aa, Homo sapiens
  DOMAIN (147)..(270): Laminin G domain identified by PFam, accession name laminin_G, E-value=0.0011, PFam score of 17.2
TAEETSGTSAGRNNVIFFAYNMTAGFGGHSDAENNEKKSALQLEQQVKELQEKLDEVKEMSQYQELAVALESSSVTINQLNENIESLLALVEHSVKVAALDVAEGGAASGAGLQVAEAEALPLTHTVSAFVFGPVGRTGVGPSEGPAGGRRGDFIYVDIFEGHLRAVVEKGQGTVLLHNSVPVADGQPHEVSVHINAHRLEISVDQYPTHTSNRGVLSYLEPRGSLLLGGLDAEASCHLQEHRLGLIPGATNVSLLGCMEDLRVNGQRQGLREALLTRNMAAGCRLEEEEYEDDAYGHYEAFSTLAPEAWLAMELPEPCVPEPGLPPVFANFTQLLTISPLVVAKGGTAWLEWWHVQPTLDLIGAELRKSQCSAPCGSGVQRRLVKCVNTQTGLPEEDSDQCGHEAWPESSRPCGTEDCEPIESP

SEQ ID NO: 15470 - protein, 352 aa, Homo sapiens
  DOMAIN (130)..(164): PPR repeat domain identified by PFam, accession name PPR, E- value=0.012, PFam score of 22.3
  misc_feature (1)...(352): Xaa = X or * as defined in Table 2
QSKRLNAKRYLLTDNVVKLKEFQQKKVAVACNLSGTKETYFRNLKKKLTQNKLILKGELITLLHLCESRDHVELAKNVIYRYHAENKNFTLGEYXFGPLFVRLCYQLDLEESAGELMKDQHLRGFFSDSTLFNILMDMLFIKGKYKSALQVLIEMKNQDVKFTKDTYVLAFAICYKLNSPESFKICTTLREEALLKGEILSRRASCFAVALALNQNEMAKAVSIFSQIMNPESIACINLNIIIHIQSNMLENLIKTLKNAAEGNLSKFVKRHVFSEEVLAKVREKVKDVPALVAKFDEIYGTLHITGQVTTDSLDAVLCHTPRDRKSHTLLLNKRMVSRRTFQPLSQSLLAE

SEQ ID NO: 15471 - protein, 165 aa, Homo sapiens
  DOMAIN (74)..(107): Malic enzymes proteins domain identified by eMATRIX, accession number BL00331I, p-value=3.813e-27, raw score of 16.81
  DOMAIN (7)..(150): Malic enzyme domain identified by PFam, accession name malic, E-value=2.3e-64, PFam score of 227.3
LLGVAPSRAFQEEILRDRASFHERPNLFALKHPTSKAECTAEKCYRVTKGRGIFPSGSPFKSVTLEDGKTFIPGQGNNAYVFPGVALGVIAGGIRHIPDEIFLLTAEQIAQEVFEQHLSQGRLYPPLSTIRDVSLRIAIKVLDYAYKHNLDSYTWPKEAMNVQTV

SEQ ID NO: 15472 - protein, 73 aa, Homo sapiens
  DOMAIN (33)..(50): MALIC ENZYME SIGNATURE domain identified by eMATRIX, accession number PR00072G, p-value=5.304e-19, raw score of 10.45
  DOMAIN (12)..(60): Malic enzyme domain identified by PFam, accession name malic, E-value=5.9e-23, PFam score of 89.7
RAGIPTTRLFPVGVAAIAGAFTEQILRDMASFHERPIIFALSNPTSKAECTAEKCYRVTEVSGESFLPPAERT

SEQ ID NO: 15473 - protein, 621 aa, Homo sapiens
  DOMAIN (123)..(168): Malic enzymes proteins domain identified by eMATRIX, accession number BL00331B, p-value=1.000e-40, raw score of 19.65
  DOMAIN (60)..(615): Malic enzyme domain identified by PFam, accession name malic, E-value=8.6e-298, PFam score of 1002.7
  misc_feature (1)...(621): Xaa = X or * as defined in Table 2
EGEDRGLPRTMGAALGTGTRLAPWPGRACGALPRWTPTAPAQGCHSKPGPARPVPLKKRGYDVTRNPHLNKGMAFTLEERLQLGIHGLIPPCFLSQDVQLLRIMRYYERQQSDLDKYIILMTLQDRNEKLFYRVLTSDVEKFMPIVYTPTVGLACQHYGLTFRRPRGLFITIHDKGHLATMLNSWPEDNIKAVVVTDGERILGLGDLGCYGMGIPVGKLALYTACGGVNPQQCLPVLLDVGTNNEELLRDPLYIGLKHQRVHGKAYDDLLDEFMQAVTDKFGINCLIQFEDFANANAFRLLNKYRNKYCMFNDDIQGTASVAVAGILAALRITNNKLSNHVFVFQGAGEAAMGIAHLLVMALEKEGVPKAEATRKIWMVDSKGLIVKGRSHLNHEKEMFAQDHPESNSLDEVVRLVKPTAIIGVAAIAEAFTEQILRNMASFRRAPIIFALSNPPRKAECTAEKCYRVTEGPRGFFASGSPFXGVLIWEMGKTFIPGGRGNNAYVFPGVATGVIAGGIRHIPDEIFLLDSRAKLPQEVSEQHLSQGRLYPPLSTIRDVSLRIAIKVLDYAYKHNLVSYYPEPKDKEAFCKIPGSYTPDYDSFYTVDSYIWAQGKAMNVQTV

SEQ ID NO: 15474 - protein, 87 aa, Homo sapiens
VGHIILLRGTLGFPWFYTSWAELLRFLLFSGIGVGGVREQGLTLSPRLKSRGVITAHCNLELLGSSSPPASAFQGARITGVHHDPAN

SEQ ID NO: 15475 - protein, 73 aa, Homo sapiens
NHFQHDFPTTSDQQHCISNQPSPLLHPHPSQYQCQAAYPHPPHCNAHGTGAKLSPSPRPPQLPPQGPLTRISC

SEQ ID NO: 15476 - protein, 152 aa, Homo sapiens; identical to SEQ ID NO: 8581
  DOMAIN (18)..(40): Globins profile domain identified by eMATRIX, accession number BL01033A, p-value=2.929e-17, raw score of 16.94
  DOMAIN (7)..(126): Globin domain identified by PFam, accession name globin, E- value=6.3e-48, PFam score of 171.6

SEQ ID NO: 15477 - protein, 182 aa, Homo sapiens
  DOMAIN (45)..(67): Globins profile domain identified by eMATRIX, accession number BL01033A, p-value=2.929e-17, raw score of 16.94
  misc_feature (1)...(182): Xaa = X or * as defined in Table 2
FCPRGQEFGEGNKLLVPDAHGVISQRRTKATITSLWGKVNVEDAGGETLGRLLVVYPWTQRFFDSFGNLSSASAIMGNPKVKAHGKKVLTILGRCQQSTLDDLKGTFAQLSELHCDKLHVDPENFKLLGNVLVTVLAIHFGKDFTPEGCRASWQKMGDFSGQCPVLQIPLKPLGPXIQSFQG

SEQ ID NO: 15478 - protein, 115 aa, Homo sapiens
ARGRKIQTHMPKDHSDIPDINRAHIINDAFNLTSAHTVPDTLALINTLFLIDQRQYMPWEAVLSSLSYFKLMFDRSHVYSPMNNYLNTLVTPLFIHFTNNTINWMEIPEHLMDHY

SEQ ID NO: 15479 - protein, 16 aa, Homo sapiens
MGFHHVSQDCLDLLTS

SEQ ID NO: 15480 - protein, 271 aa, Homo sapiens
MGIAAASVLGDLAVVFGMHVPAQADGQDHPQELDHGHTHAHAEDDAQVLLQPRLHLLHAALLVHRPVLRVVATLGPVAGGLAEALPHRKAVVLFPLDFAGTGVGDLRAIHELSVVCPVVEADPAAALHLSLHVVPGILQAVLATAVVVSNELSHDATHLLLQLAHVEVEEGPGRHLGNEDQEQESKVQPQQAADLVDGADAAQEAHEHSDCPHADEDIGPHPKRAGGGLQDRDETALVGQDPHPEAQDHCAQDKEDQVEEEEKVFGDFDTG

SEQ ID NO: 15481 - protein, 58 aa, Homo sapiens
MGNWGRSSFLKLQNLYLFLKMRSFDQAQWLTPKIPALWEAEAGGSSEVRSLRSAWSTW

SEQ ID NO: 15482 - protein, 29 aa, Homo sapiens
KWNSRPGVVAHTCNPSTLGGRGGQITRSG

SEQ ID NO: 15483 - protein, 116 aa, Homo sapiens
  misc_feature (1)...(116): Xaa = X or * as defined in Table 2
KTLLFFFFFRFEPHNLLTSMICGLVYNQPPPQHLVHILLKRRIWPQGNILGINKKRPGTVAHTCNPSTLGGRGGRITRSGVRDXPGQHSESPSLPTIQKNYPGVMAGACNPSYSGG

SEQ ID NO: 15484 - protein, 52 aa, Homo sapiens
  misc_feature (1)...(52): Xaa = X or * as defined in Table 2
IVYASEEKIXTFQEQGWPGAVAHTCNPSTLGGRGGRITRSGDRDHPGXHRPP

SEQ ID NO: 15485 - protein, 100 aa, Homo sapiens
  DOMAIN (27)..(55): !!!! PROTEIN ALU SUBFAMILY WARNING ENTRY NUCLEAR PHOSPHO domain identified by eMATRIX, accession number PD02454B, p-value= 3.571e-19, raw score of 11.61
  misc_feature (1)...(100): Xaa = X or * as defined in Table 2
IAGCRPGAVAHSCNPSTLGGRGGQITLRSGVXDQPGQYGETPSLLKIQKLGRRGGRRLKSQLLREAEAGESLEPGRQFAVSRHRATALQPGNRARLHLKK

SEQ ID NO: 15486 - protein, 64 aa, Homo sapiens
GTSFYLYRKGYLSLSKVVPFSHYAGTLLLLLARVACLLGIVRWAYPHFPQFLAISSPIHLYLTS

SEQ ID NO: 15487 - protein, 115 aa, Homo sapiens
  DOMAIN (25)..(37): POTEX AND CARLAVIRUS COAT PROTEIN SIGNATURE domain identified by eMATRIX, accession number PR00232D, p-value=8.385e-09, raw score of 12.78
VAAEIPALNWNQNGLCLRPGHTGPLESPASPRPPGCGDRPATDFLARGVAGCHGRERQPDIGGHGAARPPQSKSPWGCVSANCGAGHSCRLSGCRALPCLTPGSWSWRKDSQISC

SEQ ID NO: 15488 - protein, 172 aa, Homo sapiens
LTDDEMRRLNIPVLQDDGFLFLWVTGRAMELGRECLNLWGYERVDEIIWVKTNQLQRIIRTGRTGHWLNHGKEHCLVGVKGNPQGFNQGLDCDVIVAEVRSTSHKPDEIYGMIERLSPGTRTIELFGRPHNVQPNWITLGNQLDGIHLLDPDVVARFKQRYPDGIISKPKNL

SEQ ID NO: 15489 - protein, 279 aa, Homo sapiens
  misc_feature (1)...(279): Xaa = X or * as defined in Table 2
HMELPYGTLTDDEMRRLNIPVLQDDGFLFLWVTGRAMELGRECLNLWGYERVDEIIWVKTNQLQRIIRTGRTGHWLNHGKEHCLVSSSGAQFNRWSTKKNHLISYXEKVQRCGFIRXSVILWXAGGVKENPQGFNQGLDLXCDRSXGMCFSGLQSFHIFVGYQLFMVGCILIPRFFLIXIINIIGKGLGIAILCNLKKQLVFISXVRSTSHKPDEIYGMIERLSPGTRKIELFGRPHNVQPNWITLGNQLDGIHLLDPDVVARFKQRYPDGIISKPKNL

SEQ ID NO: 15490 - protein, 103 aa, Homo sapiens
AESTCPYYNGTPGSGRRPPVPLPPFLWGGPLSSLRSHYQHPSPYCRLAGSGNADGWPVPAVPDPGIRWHAQALRHSSPCLTLQPQLLYPLILWQATYARDALA

SEQ ID NO: 15491 - protein, 71 aa, Homo sapiens
  DOMAIN (4)..(45): B-box zinc finger domain identified by PFam, accession name zf-B_box, E-value=9.2e-12, PFam score of 52.5
QEGQKRDVCEHHGKKLQIFCKEDGKVICWVCELSQEHQGHQTFRINEVVKECQVGSKIEEERAESRRWYLM

SEQ ID NO: 15492 - protein, 58 aa, Homo sapiens
  misc_feature (1)...(58): Xaa = X or * as defined in Table 2
NWVGGQQEGREFFQVXWATDLKSAXGEEIEPDIPKLKPGGQKWETGLRFLHFDSKWFF

SEQ ID NO: 15493 - protein, 110 aa, Homo sapiens
  DOMAIN (44)..(67): SERUM ALBUMIN FAMILY SIGNATURE domain identified by eMATRIX, accession number PR00802G, p-value=3.298e-13, raw score of 14.57
HEDEFKPLVGDPHNLMDPNRELFDQLGEYKFQNALLFHYTKTVPHVSTPTLVEVSRNLRKVGSTCWKHPESKRMPCAEYYLSAVLIHLCVLHENTLFRDRVIKCCTESLV

SEQ ID NO: 15494 - protein, 477 aa, Homo sapiens; identical to SEQ ID NO: 9680
  DOMAIN (34)..(52): GLUCOSE/RIBITOL DEHYDROGENASE FAMILY SIGNATURE domain identified by eMATRIX, accession number PR00081A, p-value=6.226e- 13, raw score of 10.53
  DOMAIN (33)..(218): short chain dehydrogenase domain identified by PFam, accession name adh_short, E-value=1.5e-60, PFam score of 214.6

SEQ ID NO: 15495 - protein, 79 aa, Homo sapiens; identical to SEQ ID NO: 9682

SEQ ID NO: 15496 - protein, 518 aa, Homo sapiens
  DOMAIN (35)..(53): GLUCOSE/RIBITOL DEHYDROGENASE FAMILY SIGNATURE domain identified by eMATRIX, accession number PR00081A, p-value=6.226e- 13, raw score of 10.53
  DOMAIN (34)..(220): short chain dehydrogenase domain identified by PFam, accession name adh_short, E-value=2.7e-60, PFam score of 213.7
SMHKAGLLGLCARAWNSVRMASSGMTRRDPLANKVALVTASTDGIGFAIARRLAQDGAHVVVSSRKQQNVDQAVATLQGEGLSVTGTVCHVGKAEDRERLVATAVKLHGGIDILVSNAAVNPFFGSIMDVTEEVWDKTLDINVKAPALMTKAVVPEMEKRGGGSVVIVSSIAAFSPSPGFSPYNVSKTVLLGLTKTLAIELAPRNIRVNCLAPGLIKTSFSRMLWMDKEKEESMKETLRIRRLGEPEDCAGIVSFLCSEDASYITGETVVNLSVMFTGGGVCRAASWKEGGTGTPRTPRESPRQREPGENQARSSPRMALRPEFPPESASTSWMGPEPVGNRERPCKPARKVGASPRALRRLGSATRMLSRAALRAGVGARAPRPGGGRGAHATATVWSGLASAAALTARALLKRSLACAAAPQRCGWRRLLCSSLGSRGQGGQAHRGAHLRVVRYGTASVFGTPRLVASQIQHVPSGPAPRPGASHPATPSIQTLRQPLHLSPDIAVPGASSAGAGA

SEQ ID NO: 15497 - protein, 56 aa, Homo sapiens
ARDNQHDLQEWEEHLQEHTNVTWVGNPTIKPHSLPSHTVWTWCFSCFHTPCVAYRG

SEQ ID NO: 15498 - protein, 273 aa, Homo sapiens
KPCMMDTTGMSCSDHVTVDSPYVVAVRIADETSINTRSFSKFVGMSADATPLHVARSGNDTEDFSNPSACSDIYGESISSHFTESTGKLIESLSDCASSLPIKKIAGSNYNTFLDSELSMLNGTKVLSDSAVGIDLGSTGDTTEALHELRTAEEFKTEEQDASGSIEFGVSFPDRESSSMETSIEPKATETSRTEGITAIEESWESMFNDDGDCLDPRLLQELSGNTKSRESIQEPRSDYYNHEVPDIDLSDCEFPHVIEIYDFPQEFRTEDL

SEQ ID NO: 15499 - protein, 38 aa, Homo sapiens; identical to SEQ ID NO: 10484

SEQ ID NO: 15500 - protein, 82 aa, Homo sapiens
  DOMAIN (32)..(66): !!!! PROTEIN ALU SUBFAMILY WARNING ENTRY NUCLEAR PHOSPHO domain identified by eMATRIX, accession number PD02454A, p-value= 6.087e-09, raw score of 20.81
  misc_feature (1)...(82): Xaa = X or * as defined in Table 2
PPXITLGXKTCSQARWLMPVIPTLWKAEVGRSLELRSLRPAWATRRNPISTKNLKISWGRQGSSELRSRHCTPAWQHSETPI

SEQ ID NO: 15501 - protein, 26 aa, Homo sapiens
MTTSPPPSALQKKEMEILPVILRVPS

SEQ ID NO: 15502 - protein, 519 aa, Homo sapiens
SSLWRRQPELKAYRTMEYMAESTDRSPGHILCCECGVPISPNPANICVACLRSKVDISQGIPKQVSISFCKQCQRYFQPPGTWIQCALESRELLALCLKKIKAPLSKVRLVDAGFVWTEPHSKRLKVKLTIQKEVMNGAILQQVFVVDYVVQSQMCGDGHESEKLKDFWKAVIQVRQKTLHKKTFYYLEQLILKYGMHQNTLRIKEIHDGLDFYYSSKQHAQKMVEFLQCTVPCRYKASQRLISQDIHSNTYNYKSTFSVEIVPICKDNVVCLSPKLAQSLGNMNQICVCIRVTSAIHLIDPNTLQVADIDGSTFWSHPFNSLCHPKQLEEFIVIECSIVQDIKRAAGAGMISKKHTLGEVWVQKTSEMNTDKQYFCRTHLGHLLNPGDLVLGFDLANCNLNDEHVNKMNSDRVPDVVLIKKSYDRTKRQRRRNWKLKELARERENMDTDDERQYQDFLEDLEEDEAIRKNVNIYRDSAIPVESDTDDEGAPRISLAEMLEDLHISQDATGEEGASMLT

SEQ ID NO: 15503 - protein, 57 aa, Homo sapiens
GTSISKNRLLSIKTFLYWTILGFSHAFIFFFGSYLLIGKDTSLLGNGQMFRNCTFDA

SEQ ID NO: 15504 - protein, 76 aa, Homo sapiens; identical to SEQ ID NO: 13160

SEQ ID NO: 15505 - protein, 161 aa, Homo sapiens
  misc_feature (1)...(161): Xaa = X or * as defined in Table 2
NLMNICRGPCLLPGAPFMRDLAAVASVGLPLVRRQAQVAAGRVLVVALFEGCGGLHSRLDGAAICLPGHCHGSRVEVTYEAPQCGLVGLKLLRGGREQSDEGGSLGLTXDAQLGPGAEHPEIRAAWEXTAVIISLVLSLEPRDGQGGRVARLGAREAIGNP

SEQ ID NO: 15506 - protein, 139 aa, Homo sapiens
  misc_feature (1)...(139): Xaa = X or * as defined in Table 2
AAEASVGLPLLRRQAQIAAGRVLVVALFGGCGGLHSRLDGAAICLPGHCHGSRVEVTYETHQCGLVGLKLLRGGREQSDRGGSLGLTXDGQLGPSAEDYTISSCPHLTGIVGLIPGLDSADGQGGRVPRLGARESVRDT

SEQ ID NO: 15507 - protein, 188 aa, Homo sapiens
  misc_feature (1)...(188): Xaa = X or * as defined in Table 2
LSHPLPLLGRQAQIAAGRVLVVALLGGCGGLHSRLDGAAICLPGHCHGSRVEVTYETHQCGLVGLKLLRGGREQSDRGGSLGLTXDGQLGPSAEHQSVSVPSLTVIISLILRLEVGDGEVAVSPRAGAREAIRNSAPLVVASTTFKPHQVPRGLSCLLLMPRDVVPTVSTAQSAGEPDRGSQGSRGRG

SEQ ID NO: 15508 - protein, 109 aa, Homo sapiens
  misc_feature (1)...(109): Xaa = X or * as defined in Table 2
GSLQGLPGQSFSFGGLPLLGRQVRVAAGRVLVVALFGGFGGLHSRLDGAAICLPGHCHSSRVEVTDQTHXCGLVGLELLRGGREQSDSGVGLGLTQDGDLRSTSEDKVC

SEQ ID NO: 15509 - protein, 207 aa, Homo sapiens
  DOMAIN (154)..(177): Immunoglobulins and major histocompatibility complex proteins domain identified by eMATRIX, accession number BL00290A, p-value= 1.529e-14, raw score of 20.89
  DOMAIN (34)..(204): Immunoglobulin domain identified by PFam, accession name ig, E-value=3.4e-15, PFam score of 54.0
MTCSPLLLTLLIHCTGSWAHSVLTQPPSVSAAPGQQITISCSGSRLNVGNYFVSWYQQLPGTAPKILIYDNDKRPSGVPARFSGSKSGTSATLAITGLQTGDEANYYCGAWDTSLDNWVFGGGTEVTVLGQPKAAPSVTLFPPSSEELQANKATLVCLISDFYPGAVTVAWKADSSPVKAGVETTTPSKQSNNKYAASSYLSLTPEQ

SEQ ID NO: 15510 - protein, 214 aa, Homo sapiens
  misc_feature (1)...(214): Xaa = X or * as defined in Table 2
PWSHFRRFXLTMRIFIEGLLSAGRRAWMPWGGRRDPSPGILQLXSPVGGVRDENLXTFCRGHCLLHGAPFMRDLAAVAFVGLPLLRRQAQVAAGRVLVVALFGGFGGLHSRLDGAAICLPGHCHSSRVEVTDQTHXCGLVGLELLRGGREQSDSGVGLGLTXDGDLGPTSEDSKGATTSKRAAVIISLVVSLEPRDCQGGRVGRHGAREAIINP

SEQ ID NO: 15511 - protein, 436 aa, Homo sapiens
  DOMAIN (249)..(272): Immunoglobulins and major histocompatibility complex proteins domain identified by eMATRIX, accession number BL00290A, p-value= 1.563e-15, raw score of 20.89
  DOMAIN (36)..(427): Immunoglobulin domain identified by PFam, accession name ig, E-value=1.4e-23, PFam score of 81.0
MAWTPLLLLFPLLLHCTGSLSQPVLTQSSSASASLGSSVTLTCTLSSGHSDYIIAWHQQLPGKAPRSLMKVEGDGSYKTGRGVPDRFSGSSSGANRYLSISNFQSEDEADYYCQAWDSSTAHSDTGRCGIVGRPPVRQCWPLLLLGLAMVAHGLLRPMVAPQSGDPDPGASVGSSRSSLRSLWGRLLLQPSPQRADPRCWPRGFWSEPQSLCYVFGTGTKVTVLGQPKANPTVTLFPPSSEELQANKATLVCLISDFYPGAVTVAWKADGSPVKAGVETTKPSKQSNNKYAASSYLSLTPEQWKSHRSYSCQLQWGLGLGASQGGFLYEPVSQCVVFGGGTKLTVLGQPKAAPSVTLFPPSSEELQANKATLVCLISDFYPGAVTVAWKADSSPVKAGVETTTPSKQSNNKYAASSYLSLTPEQWKQAQKLQLPET

SEQ ID NO: 15512 - protein, 29 aa, Homo sapiens
  misc_feature (1)...(29): Xaa = X or * as defined in Table 2
GHLGPRQKQARGLXGHRAVQVLHNYVIPM

SEQ ID NO: 15513 - protein, 119 aa, Homo sapiens
  misc_feature (1)...(119): Xaa = X or * as defined in Table 2
MEGAHEEWAVSSLLPSPAGGGGCEPARREESSYRIKMTQXXXXXXXXXXXXXXXXXXXXXXXXXXXXXXXXXXXXXXXXXXXXXXXXXXXXXACRQQEDRLGQCCSLLHLQCLAQSRCH

SEQ ID NO: 15514 - protein, 58 aa, Homo sapiens
LSHFDSVTGFLSAGRLTPSTPSWRWKEDAHRPFLMQAIDGNVRQCESTPEHFWGPLWD

SEQ ID NO: 15515 - protein, 67 aa, Homo sapiens
  DOMAIN (24)..(52): !!!! PROTEIN ALU SUBFAMILY WARNING ENTRY NUCLEAR PHOSPHO domain identified by eMATRIX, accession number PD02454B, p-value= 3.688e-14, raw score of 11.61
GQGAVAHTCNPSTLGGQGGRITLRSGVQNQPDQHGETLSLLNISGVWWRAPVIAAFQEAETGESLEP

SEQ ID NO: 15516 - protein, 124 aa, Homo sapiens
  DOMAIN (85)..(113): !!!! PROTEIN ALU SUBFAMILY WARNING ENTRY NUCLEAR PHOSPHO domain identified by eMATRIX, accession number PD02454B, p-value= 7.662e-14, raw score of 11.61
YQGLAAWQRKKNRLRHMIEDRQGCHNHNHGKDQDQKGPPSLTPNPWADGSRTQNFPSCRKMGPGAVAHACNPSILGGQGGADHLRSGVRDQPGQHGETPVSTKKKKKKKKKKKKKLAGHGGSRL

SEQ ID NO: 15517 - protein, 44 aa, Homo sapiens
VVEEEVCLLLLPNDMTVYLEHPKDSSKKLLELVNAFSKVSRYIV

SEQ ID NO: 15518 - protein, 118 aa, Homo sapiens
PFAPAAGIRHEVNMGQKQEILDLFSSVLYECVTQETPEMLPAYIAMDQAIRRLGRREMSETSELWQIKLVLEFFSSRSHQERLQNHPKRGLFMNSEFLPVVKCTIDNTLDQWLQVGGD

SEQ ID NO: 15519 - protein, 146 aa, Homo sapiens
AALAQHCTLEVGGAGSGGTQAISSPLVAGRFPTGIREATCVRARPWDRELHYPVPSRGGRWNDLSSSGSGEKRRLISKPVCSQIKSSFINPQSAPDSSSNISAGGGGHGKPAQQRLPDREACLLFRLFPMFSLDCRRGSRSCGEGR

SEQ ID NO: 15520 - protein, 103 aa, Homo sapiens
  DOMAIN (10)..(47): Eukaryotic-type carbonic anhydrases proteins domain identified by eMATRIX, accession number BL00162C, p-value=1.281e- 35, raw score of 17.78
  DOMAIN (1)..(68): Eukaryotic-type carbonic anhydrase domain identified by PFam, accession name carb_anhydrase, E-value=4.3e-38, PFam score of 140.0
LKGGPFSDSYRLFQFHFHWGSTNEHGSEHTVDGVKYFAELHVPHWNSAKYSSLAEADSKADGLAIIGAMKKDDKANPPLDHVQVGVRADRNFYGIEVLSDALI

SEQ ID NO: 15521 - protein, 16 aa, Homo sapiens
  DOMAIN (7)..(14): PAPAIN CYSTEINE PROTEASE (C1) FAMILY SIGNATURE domain identified by eMATRIX, accession number PR00705C, p-value=9.250e- 10, raw score of 11.87
QNASCFCWCCCCCRNW

SEQ ID NO: 15522 - protein, 54 aa, Homo sapiens
IESPEANSCIDGQLLFDGGIRIAHWAKDSSSSSSSSSSSSSTCRRMKLDPYHTP

SEQ ID NO: 15523 - protein, 69 aa, Homo sapiens
TEELKRCRQTLPSGCGVLPWRARLAVGVSGRRGRSSSPMLTPSAAPCGNPGSLTSNLPAAGCKPSCQAW

SEQ ID NO: 15524 - protein, 54 aa, Homo sapiens
IESPETNSCIDGQLLFDGGIRITHWAKDSSSSSSSSSSSSSTCRRIQLDPYLTP

SEQ ID NO: 15525 - protein, 123 aa, Homo sapiens
  DOMAIN (7)..(40): CTF/NF-I proteins domain identified by eMATRIX, accession number BL00349G, p-value=5.138e-09, raw score of 19.72
  misc_feature (1)...(123): Xaa = X or * as defined in Table 2
RLHRFFLGESEQPSPASSSSSSSSSLTPSQTRQHGPLRSIMKDLHSDDYEEESYEVDDNDNDSKMERPANRXRTRSRTVSLSDGSDSESRTSSXPLHYEPPPPLLYTNNNQILEVESPITHSL

SEQ ID NO: 15526 - protein, 598 aa, Homo sapiens
  DOMAIN (173)..(203): Flocculin repeat proteins domain identified by eMATRIX, accession number PF00624I, p-value=9.838e-12, raw score of 9.10
  misc_feature (1)...(598): Xaa = X or * as defined in Table 2
ITAEGGRRRGGYHTTPQQTSGPPGMASSCSVQVKLELGHRAQVRKKPTVEGFTHDWMVFVRGPEHSNIQHFVEKVVFHLHESFPRPKRVCKDPPYKVEESGYAGFILPIEVYFKNKEEPRKVRFDYDLFLHLEGHPPVNHLRCEKLTFNNPTEDFRRKLLKAGGDPNRSIHTSSSSSSSSSSSSSSSSSSSSSSSSSSSSSSSSSSSSSSSSSSTSFSKPHKLMKEHKEKPSKDSREHKSAFKEPSRDHNKSSKESSKKPKENKPLKEEKIVPKMAFKEPKPMSKEPKPDSNLLTITSGQDKKAPSKRPPISDSEELSAKKRKKSSSEALFKSFSSAPPLILTCSADKKQIKDKSHVKMGKVKIESETSEKKKSTLPPFDDIVDPNDSDVEENISSKSDSEQPSPASSSSSSSSSFHTIPGPGQQGPLRSIMKDLHSDDNEEEADEAEDSDNDSEMERPVNRGGSRSRRVSLSDGSDSESSSASSPLHHEPPPPLLKTNNNQDSWKWKSPIKQSKSDXGKLKNGECXQGLTXMELVGAFTGRFIDFEEERHILQQIVNLIEETGHFHITNTTFDFDLCSLDKTTVRKLQSYLETSGTS

SEQ ID NO: 15527 - protein, 105 aa, Homo sapiens
VPGAGLGRVAWEIAMLGYACQGNEWSFFMLFSSNFVLNRCSEINKYKLYPWIHQFSNNRRSADQIRPIFFPDVDPHSLPPGSNFSMTAGDFQEIYSECSKSKSSV

SEQ ID NO: 15528 - protein, 107 aa, Homo sapiens
  DOMAIN (22)..(45): PI3 KINASE P85 REGULATORY SUBUNIT SIGNATURE domain identified by eMATRIX, accession number PR00678H, p-value=7.805e-12, raw score of 9.13
  DOMAIN (17)..(43): Src homology domain 2 domain identified by PFam, accession name SH2, E-value=0.00046, PFam score of 15.4
VHCLGADLLEINNNPCYWGVMDKYAAEALLEGKPEGTFLLRDSAQEDYLFSGSFRRYSRSLHARIEQWNHNFSFDAHDPCVFHSPDITGLLEHYKDPSACMFFEPLL

SEQ ID NO: 15529 - protein, 29 aa, Homo sapiens
TFLAQNVQLCFPYYPSPGVLFPKKEPDDS

SEQ ID NO: 15530 - protein, 1646 aa, Homo sapiens
  DOMAIN (79)..(121): Chloramphenicol acetyltransferase proteins domain identified by eMATRIX, accession number BL00100C, p-value=1.000e-39, raw score of 23.60
  DOMAIN (6)..(191): Chloramphenicol acetyltransferase domain identified by PFam, accession name CAT, E-value=1e-132, PFam score of 454.3
MEKKITGYTTVDISQWHRKEHFEAFQSVAQCTYNQTVQLDITAFLKTVKKNKHKFYPAFIHILARLMNAHPEFRMAMKDGELVIWDSVHPCYTVFHEQTETFSSLWSEYHDDFRQFLHIYSQDVACYGENLAYFPKGFIENMFFVSANPWVSFTSFDLNVANMDNFFAPVFTMGKYYTQGDKVLMPLAIQLPVSQPVPTIQGEPQIPVATQPSVVPVHSGAHFLPVGQPLPTPLLPQYPVSQIPISTPHVSTAQTGFSSLPITMAAGITQPLLTLASSATTAAIPGVSTVVPSQLPTLLQPVTQLPSQVHPQLLQPAVQSMGIPANLGQAAEVPLSSGDVLYQGFPPRLPPQYPGDSNIAPSSNVASVCIHSTVLSPPMPTEVLATPGYFPTVVQPYVESNLLVPMGGVGGQVQVSQPGGSLAQAPTTSSQQAVLESTQGVSQVAPAEPVAVAQTQATQPTTLASSVDSAHSDVASGMSDGNENVPSSSGRHEGRTTKRHYRKSVRSRSRHEKTSRPKLRILNVSNKGDRVVECQLETHNRKMVTFKFDLDGDNPEEIATIMVNNDFILAIERESFVDQVREIIEKADEMLSEDVSVEPEGDQGLESLQGKDDYGFSGSQKLEGEFKQPIPASSMPQQIGIPTSSLTQVVHSAGRRFIVSPVPESRLRESKVFPSEITDTVAASTAQSPGMNLSHSASSLSLQQAFSELRRAQMTEGPNTAPPNFSHTGPTFPVVPPFLSSIAGVPTTAAATAPVPATSSPPNDISTSVIQSEVTVPTEEGIAGVATSTGVVTSGGLPIPPVSESPVLSSVVSSITIPAVVSISTTSPSLQVPTSTSEIVVSSTALYPSVTVSATSASAGGSTATPGPKPPAVVSQQAAGSTTVGATLTSVSTTTSFPSTASQLCIQLSSSTSTPTLAETVVVSAHSLDKTSHSSTTGLAFSLSAPSSSSSPGAGVSSYISQPGGLHPLVIPSVIASTPILPQAAGPTSTPLLPQVPSIPPLVQPVANVPAVQQTLIHSQPQPALLPNQPHTHCPEVDSDTQPKAPGIDDIKTLEEKLRSLFSEHSSSGAQHASVSLETSLVIESTVTPGIPTTAVAPSKLLTSTTSTCLPPTNLPLGTVALPVTPVVTPGQVSTPVSTTTSGVKPGTAPSKPPLTKAPVLPVGTELPAGTLPSEQLPPFPGPSLTQSQQPLEDLDAQLRRTLSPEMITVTSAVGPVSMAAPTAITEAGTQPQKGVSQVKEGPVLATSSGAGVFKMGRFQVSVAADGAQKEGKNKSEDAKSVHFESSTSESSVLSSSSPESTLVKPEPNGITIPGISSDVPESAHKTTASEAKSDTGQPTKVGRFQVTTTANKVGRFSVSKTEDKITDTKKEGPVASPPFMDLEQAVLPAVIPKKEKPELSEPSHLNGPSSDPEAAFLSRDVDDGSGSPHSPHQLSSKSLPSQNLSQSLSNSFNSSYMSSDNESDIEDEDLKLELRRLRDKHLKEIQDLQSRQKHEIESLYTKLGKVPPAVIIPPAAPLSGRRRRPTKSKGSKSSRSSSLGNKSPQLSGNLSGQSAASVLHPQQTLHPPGNIPESGQNQLLQPLKPSPSSDNLYSAFTSDGAISVPSLSAPGQGCAKFNCASEQVTFKPGGRRTRFLSTPCLALCV

SEQ ID NO: 15531 - protein, 1295 aa, Homo sapiens
PPTCSNSPSSFLSQGFPPRLPPQYPGDSNIAPSSNVASVCIHSTVLSPPMPTEVLATPGYFPTVVQPYVESNLLVPMGGVGGQVQVSQPGGSLAQAPTTSSQQAVLESTQGVSQVAPAEPVAVAQPQATQPTTLASSVDSAHSDVASGMSDGNENVPSSSGRHEGRTTKRHYRKSVRSRSRHEKTSRPKLRILNVSNKGDRVVECQLETHNRKMVTFKFDLDGDNPEEIATIMVNNDFILAIERESFVDQVREIIEKADEMLSEDVSVEPEGDQGLESLQGKDDYGFSGSQKLEGEFKQPIPASSMPQQIGIPTSSLTQVVHSAGRRFIVSPVPESRLRESKVFPSEITDTVAASTAQSPGMNLSHSASSLSLQQAFSELRRAQMTEGPNTAPPNFSHTGPTFPVVPPFLSSIAGVPTTAAATAPVPATSSPPNDISTSVIQSEVTVPTEEGIAGVATSTGVVTSGGLPIPPVSESPVLSSVVSSITIPAVVSISTTSPSLQVPTSTSEIVVSSTALYPSVTVSATSASAGGSTATPGPKPPAVVSQQAAGSTTVGATLTSVSTTTSFPSTASQLSIQLSSSTSTPTLAETVVVSAHSLDKTSHSSTTGLAFSLSAPSSSSSPGAGVSSYISQPGGLHPLVIPSVIASTPILPQAAGPTSTPLLPQVPSIPPLVQPVANVPAVQQTLIHSQPQPALLPNQPHTHCPEVDSDTQPKAPGIDDIKTLEEKLRSLFSEHSSSGAQHASVSLETSLVIESTVTPGIPTTAVAPSKLLTSTTSTCLPPTNLPLGTVALPVTPVVTPGQVSTPVSTTTSGVKPGTAPSKPPLTKAPVLPVGTELPAGTLPSEQLPPFPGPSLTQSQQPLEDLDAQLRRTLSPEMITVTSAVGPVSMAAPTAITEAGTQPQKGVSQVKEGPVLATSSGAGVFKMGRFQVSVAADGAQKEGKNKSEDAKSVHFESSTSESSVLSSSSPESTLVKPEPNGITIPGISSDVPESAHKTTASEAKSDTGQPTKVGRFQVTTTANKVGRFSVSKTEDKITDTKKEGPVASPPFMDLEQAVLPAVIPKKEKPELSEPSHLNGPSSDPEAAFLSRDVDDGSGSPHSPHQLSSKSLPSQNLSQSLSNSFNSSYMSSDNESDIEDEDLKLELRRLRDKHLKEIQDLQSRQKHEIESLYTKLGKVPPAVIIPPAAPLSGRRRRPTKSKGSKSSRSSSLGNKSPQLSGNLSGQSAASVLHPQQTLHPPGNIPESGQNQLLQPLKPSPSSDNLYSAFTSDGAISVPSLSAPGQGNKATIIVQKQ

SEQ ID NO: 15532 - protein, 78 aa, Homo sapiens
ISGQEGLQAVLASDYSFAQFRYLQRLLLVHGRWSYFRMCKFLCYFFYKNFAFTLVHFWFGFFCGFSAQTVYDQWFITL

SEQ ID NO: 15533 - protein, 45 aa, Homo sapiens
  DOMAIN (20)..(33): IMP dehydrogenase / GMP reductase proteins domain identified by eMATRIX, accession number BL00487C, p-value=7.231e-10, raw score of 10.90
LLLLFSLLFHRSLLFIPFRRLLGIITKKDILRHMAQTANQDPASI

SEQ ID NO: 15534 - protein, 161 aa, Homo sapiens
  misc_feature (1)...(161): Xaa = X or * as defined in Table 2
GRDMVAPDASWKEASGCNAPARICPGQAFRANGCSDPTLGIQHQRLFRSRLSPKVLGPVGQPWELGGEXDEAPSASFFSHWEVLGRLLVGASGSPSVKQEPAALERARVPGDAARRQPRDRKGPPGPPCCSEHPAPVRAPLVAGLGDAGSGAPRAKLGVMM

SEQ ID NO: 15535 - protein, 795 aa, Homo sapiens; identical to SEQ ID NO: 15234

SEQ ID NO: 15536 - protein, 144 aa, Homo sapiens
RLRVFLSLMETGWFDNLLLDIDKADAIVKMLDAAVIKMEGGTENDLRILEQEEEEEQAGKPGEPSKKEEGRAGAGLGDGERKTNDKDSEKEAKKSSKKRNRKHSGDDSFDEGSVSESESESESGQAEEEKEEAEALKEKEKPKE

SEQ ID NO: 15537 - protein, 823 aa, Homo sapiens
  misc_feature (1)...(823): Xaa = X or * as defined in Table 2
GETGMSTALTHTTVAMRCPMLGGGGGPTYGPPQPWGHPDVHIMQHHVLPIQARLGSIAEIDLGVPPPVMKTFKEFLLSLDDSVDETEAVKRYNDYKLDFRRQQMQDFFLAHKDEEWFRSKYHPDEVGKRRQESRGALQNRLRVFLSLMETGWFDNLLLGHXTKLIAIVKMLDAAVIKMEGGTENDLRILEQEEEEEQAGKPGEPSKKEEGRAGAGLGDGERKTNDKDEKKEDGKQAENDSSNDDKTKKSEGDGDKEEKKEDSEKEAKKSSKKRNRKHSGDDSFDEGSVSESESESESGQAEEEKEEAEEALKEKEKPKEEEWEKPKDAAGLECKPRPLHKTCSLFMRNIAPNISRAEIISLCKRYPGFMRVALSEPQPERRFFRRGWVTFDRSVNIKEICWNLQNIRGARSLINRWCSRGKGLRAAVSLASGLRECELSPGVNRDLTRRVRNINGITQHKQIVRNDIKLAAKLIHTLDDRTQLWASEPGTPPLPTSLPSQNPILKNITDYLIEEVSAEEEELLGSSGGAPPEEPPKEGNPAEINVERDEKLIKVLDKLLLYLRIVHSLDYYNTCEYPNEDEMPNRCGIIHVRGPMPPNRISHGEVLEWQKTFEEKLTPLLSVRESLSEEEAQKMGRKDPEQEVEKFVTSNTQELGKDKWLCPLSGKKFKGPEFVRKHIFNKHAEKIEEVKKEVAFFNNFLTDAKRPALPEIKPAQPPGPAQIIHVPVRVVLPPGLTPGLPYPHQTPQGLMPYGQPRPPILGYGVPTGGPPYPHAPYGAGRGNYDAFRGQGGYPGKPRNRMVRGDPRAIVEYRDLDAPDDVDFF

SEQ ID NO: 15538 - protein, 67 aa, Homo sapiens
RRNWRAWISRKTGFTRTQRRPRTYKRRNYQTYYRNMWLWAQMQRDSTRAGVCDRQLRKRGARELSDH

SEQ ID NO: 15539 - protein, 332 aa, Homo sapiens
  DOMAIN (232)..(273): kw TRANSCRIPTASE REVERSE II ORF2 domain identified by eMATRIX, accession number DM01354I, p-value=2.125e-39, raw score of 15.55
  DOMAIN (3)..(218): AP endonuclease family 1 domain identified by PFam, accession name AP_endonucleas1, E-value=1.6e-34, PFam score of 128.2
  misc_feature (1)...(332): Xaa = X or * as defined in Table 2
MAVMLHSAKWPLPVLQQGLTMQPPLPSKHISERSEEDSRQPLYSVILIFYEAGFAILVFDKTDFQPKKVKRDKEGHYIMVKGSMQQEELTILNIYAPNTGASSFIKQVLGDPQRDLDSHTIIVGDFNTPLSILDRLMRQKINKDIQDLNSALDQVDLIDIYRTLHPKSTEYTFFSAPHHTYSKIDHIIGSKTLLSKCKRTEIITNSLSDHSAIKLELRIEKFTQNHTTTWKLNNLPLNDYWVNNEIKAEINKFFETNENRDTMYQNLWDTAKAVFRGKFIALNGHRRKXERSKINTLTLQLKELEKQEQTHSKASRRQEITKIRAELKEIDS

SEQ ID NO: 15540 - protein, 558 aa, Homo sapiens
  DOMAIN (512)..(556): Pancreatic trypsin inhibitor (Kunitz) family proteins domain identified by eMATRIX, accession number BL00280, p-value=7.070e-26, raw score of 24.61
  DOMAIN (231)..(405): von Willebrand factor type A domain identified by PFam, accession name vwa, E-value=2.1e-42, PFam score of 154.3
MNSALDQLDLIDIYRTFHPKSAEYAFFSALHHPYSKIEHIIGSKTLLSKCKRMEIITNNLSDHSEIKLELRIKKLTQNRTSTWKLNNLLLNDYWVNNEIKAEINKFFETKENKDTSCAPSSRLEVLGAKGHAHMFLYATLWMHAIPEFSVEMATAWSESASLDHSPILSFLPQEFPADRDGSLALHSTYESLRLSASSWTVNPLRGINMMPSSLAPSSQGCGPKCKETPLELVFVIDSSESVGPENFQIIKNFVKTMADRVALDLATARIGIINYSHKVEKVANLKQFSSKDDFKLAVDNMQYLGEGTYTATALQAANDMFEDARPGVKKVALVITDGQTDSRDKEKLTEVVKNASDTNVEIFVIGVVKKNDPNFEIFHKEMNLIATDPEHVYQFDDFFTLQDTLKQKLFQKICEDFDSYLVQIFGSSSPQPGFGMSGEELSESTPEPQKEISESLSVTRDQDEDDKAPEPTWADDLPATTSSEATTTPRPLLSTPVDGAEDPRCLEALKPGNCGEYVVRWYYDKQVNSCARFWFSGCNGSGNRFNSEKECQETCIQG

SEQ ID NO: 15541 - protein, 119 aa, Homo sapiens
  DOMAIN (94)..(108): pfkB family of carbohydrate kinases proteins domain identified by eMATRIX, accession number BL00583C, p-value=2.756e- 10, raw score of 7.19
HEGLKMLHTTPIATACLDADLYLLTEVHCPKELGACMPTGLTVDRATDAGDGALVLSKRRSQALIITLRAEGCVMLPQTDPEPELIATDNGKAADTTDAGDSFVGALAFYLAYYPNLSL

SEQ ID NO: 15542 - protein, 56 aa, Homo sapiens
PELRAELFESLQEQPGALPVPGPSRSAPSSPAPRRTKQVSSGWTALRDPDQAEGCC

SEQ ID NO: 15543 - protein, 108 aa, Homo sapiens
  DOMAIN (7)..(55): Membrane attack complex components / perforin proteins domain identified by eMATRIX, accession number BL00279E, p-value=2.884e- 09, raw score of 37.11
  DOMAIN (22)..(85): EGF-like domain identified by PFam, accession name EGF, E- value=2.4e-10, PFam score of 47.8
NTSQYHGVGYTGLGCETDIDECRPLPCLNNGVCKDLVGEFICECPSGYTGQRCEENINECSSTPCLNKGICADGVAGYRCTCVKGLARNMIPMFLWCLTNLYTTAYYY

SEQ ID NO: 15544 - protein, 27 aa, Homo sapiens
IRSQLNEKVAQLYADLDGGFFLPTLLF

SEQ ID NO: 15545 - protein, 90 aa, Homo sapiens
  DOMAIN (4)..(32): !!!! PROTEIN ALU SUBFAMILY WARNING ENTRY NUCLEAR PHOSPHO domain identified by eMATRIX, accession number PD02454B, p-value= 7.181e-12, raw score of 11.61
  misc_feature (1)...(90): Xaa = X or * as defined in Table 2
ADHLKSGVXDQPGQHGEILSLLKLQXFPGRGGAHLXSQLLGRLKQENHLNPGGGGCSEPRLCHWTPVRATVGDSVQKKXKSQDGPRAKLG

SEQ ID NO: 15546 - protein, 123 aa, Homo sapiens
SVSDKGGISPAAIAKECQVQIAYHDQKRQVVPVSTRGFNNKHLRESLCSDPLKETNSDEQHSTSALTEVEMNQPQHATELMVTSDHIVPGDMAREPVEETTKSPSDVNISAQPALSNFISQLV

SEQ ID NO: 15547 - protein, 117 aa, Homo sapiens
GTRGNSDELDEPIKTVFADVAFVKKHNLMSLNSINWSRVLVQMAHHFFAYFQCTPSLDTHPLPLLVVSLFFSTYLFHTFFVTPLFLIFLSSSSHFHLSIYLSSIILSSHSFSSYTIL

SEQ ID NO: 15548 - protein, 131 aa, Homo sapiens
  DOMAIN (3)..(131): Serum albumin family domain identified by PFam, accession name transport_prot, E-value=3.2e-05, PFam score of -5.7
ARGSKCCKHPEAKRMPCAEDYLSVVLDSLCVLHEKTPVSDRVTKCCTESLVNRRPCFSALEVDETYVPKEFNAETFTFHADICTLSEKERQIKKQTALVELVKHKPKATKEQLKAVMDDFAAFVQKCCKAD

SEQ ID NO: 15549 - protein, 327 aa, Homo sapiens; identical to SEQ ID NO: 11613
  DOMAIN (269)..(287): SERUM ALBUMIN FAMILY SIGNATURE domain identified by eMATRIX, accession number PR00802C, p-value=5.500e-20, raw score of 12.28
  DOMAIN (1)..(296): Serum albumin family domain identified by PFam, accession name transport_prot, E-value=1e-06, PFam score of 16.4
  misc_feature (1)...(327): Xaa = X or * as defined in Table 2

SEQ ID NO: 15550 - protein, 37 aa, Homo sapiens
SFHVFAQPDLNLLSSRDLPALASQSTGITGMSHQCPG

SEQ ID NO: 15551 - protein, 82 aa, Homo sapiens
GTRSCENIHLHSEAVLCTVPNDLLKLNSELNIEWKQAISSTVLGKVIVQPDHNFTGLIAGVVLIITALLLLLGFILRYNIED

SEQ ID NO: 15552 - protein, 75 aa, Homo sapiens
  DOMAIN (40)..(75): Enoyl-CoA hydratase/isomerase proteins domain identified by eMATRIX, accession number BL00166D, p-value=4.316e-19, raw score of 22.87
TAAGCQLVASCDIAVASDKSSFATPGVNVGLFCSTPGVALARAVPIKVALEMLFTGEPISAQEALLHGLLNKVLL

SEQ ID NO: 15553 - protein, 62 aa, Homo sapiens
FRWSEQSGQMAEMIRSMAKVPIVWNHGSIVSPQPQMIWLIVGAKHKDLWKLLIALNKITIWE

SEQ ID NO: 15554 - protein, 236 aa, Homo sapiens; identical to SEQ ID NO: 12804
  DOMAIN (39)..(50): TRANSFERASE GLYCOSYLTRANSFERASE domain identified by eMATRIX, accession number PD01966A, p-value=8.971e-13, raw score of 9.27
  misc_feature (1)...(236): Xaa = X or * as defined in Table 2

SEQ ID NO: 15555 - protein, 78 aa, Homo sapiens
  misc_feature (1)...(78): Xaa = X or * as defined in Table 2
SGDRDHPGXHSETLSLLKIQQIAGRGGGRLXSRLLRRLRQENGVSPGGGACSEPRSHHCTPAWETERDSVSKKKKKKL

SEQ ID NO: 15556 - protein, 196 aa, Homo sapiens
  DOMAIN (146)..(187): TRANSFERASE GLYCOSYLTRANSFERASE domain identified by eMATRIX, accession number PD01966B, p-value=8.953e-24, raw score of 22.84
  misc_feature (1)...(196): Xaa = X or * as defined in Table 2
RQSRWREQLPRLSWRLVPRIMRLVAECGRSRARAGELWLPHGTVATPVFMPVGTQATMKGITFEFLDALGCRICLGNTYHLGLRPGPELIQKANGLPRLSXIWPSLILLNGTAAVFQMVSLVSLSEVTEEGVRFRSPYDGNETLLSPEKSVQIQNALGSDIIMQLDDVVSSTVTGPRVEEAMYRSIRWLDRCICSH

SEQ ID NO: 15557 - protein, 80 aa, Homo sapiens
MTALDLFLTNQFSEALSYLKPRTKESMYHSLTYATILEMQAMMTFDPQDILLAGNMMKEAQMLCQRHRRKSSVTDSFSSL

SEQ ID NO: 15558 - protein, 640 aa, Homo sapiens; identical to SEQ ID NO: 9375
  misc_feature (1)...(640): Xaa = X or * as defined in Table 2

SEQ ID NO: 15559 - protein, 95 aa, Homo sapiens
QNEASRKNKKKKEKSTSKYEVLTVQEPPRIEDAEEFPNLAGASEREDSLETRDIECTWASLEDLKFPELKVHLAEENGLLHSRGFWGALTPFSLS

SEQ ID NO: 15560 - protein, 135 aa, Homo sapiens
NTTAATVAPFSSPVFTLSSTPQTIQRTVSKESLLVSHPSVQTKSPGGLSIQNEPLPPGPTEPTPPPFTFSIPSGNQFQPRCESPIPVSPTIRIQNPVAFLSSVLPSIPAIPLTNAMGLPRSAPSMPSHVLAYINI

SEQ ID NO: 15561 - protein, 130 aa, Homo sapiens
NLLQAIIDSLSGEDKREHRGKEEALVLDTKKDLKQITSHLLDMLVSKKVSGQGRDQALNLLNKNVPRKDLAIHDNSRTIYVVDNGLRKILKVVGQVPDLPSCLPLTDNTRMLASILINKLYDDLRCDPER

SEQ ID NO: 15562 - protein, 68 aa, Homo sapiens
GSGPPHSAPPKGWFFSHHSEPEICLPPPRNKELPLPRRHSLGPPLSLFKRRPPYFVHFLSFPFYPYLS

SEQ ID NO: 15563 - protein, 121 aa, Homo sapiens
NQRHMLGHHAEMEIARLLKANNTLLKMGYHLELPGPRMVVTNLLTRNQDKQRQKRQEEQKQQQLKEQKKLIAMLENGLGLPPGMWELLGGPKPDSRMQEFFQPPPPRPPNPQNVPFSQRSE

SEQ ID NO: 15564 - protein, 141 aa, Homo sapiens
TETKINFQNVKAMDLIHLFIYLFYFVFETESRSIGRLEFSGTISAHCNLRLPDSSNSPASAYLVAGTTGARHHARLIFVFLLETGFHHVGPEWSRSLDLVIPPPRPPKALGLQGGATAPGLSSVQFLKRNLNPVVFFQHKQ

SEQ ID NO: 15565 - protein, 86 aa, Homo sapiens
  misc_feature (1)...(86): Xaa = X or * as defined in Table 2
RPRRSSSTSXSPHXPPAVAAAPSGAPPWGLSCPRRPRAPPAAAPPEALGQGPGSTRGAAEVAGAAGSRPPQPFYSDFQSRFCCIKS

SEQ ID NO: 15566 - protein, 114 aa, Homo sapiens
  DOMAIN (14)..(42): !!!! PROTEIN ALU SUBFAMILY WARNING ENTRY NUCLEAR PHOSPHO domain identified by eMATRIX, accession number PD02454B, p-value= 6.260e-14, raw score of 11.61
  misc_feature (1)...(114): Xaa = X or * as defined in Table 2
SQHFGRPRRADHLRSGVQDQPDQHGETPSLLGGRGGRITKSGDRDHPGXHGETPSLLKMQEKLAGRGGGRLWSQLLGRLRQENGVSPGGRACSEPRSCHCTPAWLTEQDSVSKK

SEQ ID NO: 15567 - protein, 139 aa, Homo sapiens
  DOMAIN (76)..(109): PROLINE-RICH PROTEIN 3 domain identified by eMATRIX, accession number DM00215, p-value=1.000e-09, raw score of 19.43
PPAVAAAPSGAPPWGLSCPRRPRAPPAAAPPEALGQGPGSTRGAAEVAGAAGSRPPQPPSCCGSGRPSSPRSCPPPPLPCFPPSLLPPGTRPPHRHLPPVSTPGQRAPAASPSYIASARNGRSGEGCKCARSLALRGAD

SEQ ID NO: 15568 - protein, 105 aa, Homo sapiens
  DOMAIN (28)..(61): RECEPTOR INTERLEUKIN-1 PRECURSOR domain identified by eMATRIX, accession number PD02870B, p-value=2.600e-10, raw score of 18.83
  DOMAIN (4)..(45): Immunoglobulin domain identified by PFam, accession name ig, E-value=2e-05, PFam score of 22.5
TAIWTKDGKAITQGGKYKLSEDKGGFFLEIHKTDTSDSGLYTCTVKNSAGSVSSSCKLTIKAIKDTEAQKVSTQKTSEITPQKKAVVQEEISQKALRSEEIKMSE

SEQ ID NO: 15569 - protein, 116 aa, Homo sapiens
RRRLVVVSGFAVPFPCLEVPLLGFAWVLGTGTAPSGWGDWDRMPSWYSCLPSMWGQKEQVLPRAGSWGFWPGSVRGENCPPVPQAPQPLPPAQFLHSRLFCQRGRPHRVPPGFARV

SEQ ID NO: 15570 - protein, 110 aa, Homo sapiens
  DOMAIN (25)..(45): RUSTICYANIN SIGNATURE domain identified by eMATRIX, accession number PR00158D, p-value=9.910e-09, raw score of 9.37
GLYMVNGPPHFTESTVFPRVNIISVTNKGLLHSFDLLKAGSLEFSPKNTVLATRQPYTTCKDGTAGIPNLQLYDVKTGTCLKSFIQKKMHNWCPSWSEDETLCARNVNNE

SEQ ID NO: 15571 - protein, 111 aa, Homo sapiens
  misc_feature (1)...(111): Xaa = X or * as defined in Table 2
LSMANGPPHCTECTAFPRESGKNCKVCIFNTDGTLVAWRTGQKADIISVSSKGLLHSFYLLKAVCLEFSPKNTALXTGLPYSTSKDATAGIPNLQLYDVKTGTCLKSFLQK

SEQ ID NO: 15572 - protein, 57 aa, Homo sapiens
GPGSALVNSHPSGFSFRDNMAPSTPLLTVRGSEGLYMVNGPPHFTESTVFPRYDLFC

SEQ ID NO: 15573 - protein, 27 aa, Homo sapiens
MYSPSDPRTVKSGVDGAMLSRKEKPLG

SEQ ID NO: 15574 - protein, 67 aa, Homo sapiens
NHVFLFICFGDGVSLCCPGWSRTPGLKQSSCLGLPGCWDYRYEPACPFYKQVFSNVTSSRADVSVTP

SEQ ID NO: 15575 - protein, 109 aa, Homo sapiens
SICRAMKLEPYFTLYSKINLKWVIDLNIISKTVKLQENNIRENNLDISLGKDIYLTYLTAKAQSMKAKIYKWYYTKLKIFCTTKNRVNRMKRQPTNWEKIFISHMYDKR

SEQ ID NO: 15576 - protein, 94 aa, Homo sapiens
AAWILKARALTEMVYIDEIDVDQEGIAEMMLDENAIAPSSTPITQAGRPITGFLRPSTQSGRPGTMEQAIRTPRTAYTARPITSSSGRFVRLGT

SEQ ID NO: 15577 - protein, 142 aa, Homo sapiens
  DOMAIN (41)..(88): BIR repeat proteins domain identified by eMATRIX, accession number BL01282A, p-value=9.338e-15, raw score of 32.95
  DOMAIN (18)..(88): Inhibitor of Apoptosis domain identified by PFam, accession name BIR, E-value=3.1e-32, PFam score of 120.5
MGAPTLPPAWQPFLKDHRISTFKNWPFLEGCACTPERMAEAGFIHCPTENEPDLAQCFFCFKELEGWEPDDDPIEEHKKHSSGCAFLSVKKQFEELTLGEFLKLDRERAKNKIAKETNNKKKEFEETAKKVRRAIEQLAAMD

SEQ ID NO: 15578 - protein, 256 aa, Homo sapiens
  misc_feature (1)...(256): Xaa = X or * as defined in Table 2
QAAWILKARALTEMVYIDEIDVDQEGIAEMMLDENAIAQVPRPGTSLKLPGTNQTGGPSQAVRPTSHSEKPITGFLRPSTQSGRPGTMEQAIRTPRTAYTARPITSSSGRFVRLGTASMLTSPDGPFINXSRLNLTKYSQKPKMAKALPEYIFHHENDVKTALELAALSTEHSQYKDWWWKVQIEKRYYRLGMYREAEKQIKSSLKQQEMVDTFLYLAKVYVSLDQPVTALNLFKQGLHKFPGEVTLLCGIARIYE

SEQ ID NO: 15579 - protein, 87 aa, Homo sapiens
FCFGLSCSLLPFFFFFFFEMESRSVAQAGVQWCDLSSLHPLPPGSSNAPASASRVAGTTGAYHQCLANFGFVFLVETGVSLCWLGWS

SEQ ID NO: 15580 - protein, 158 aa, Homo sapiens
  DOMAIN (43)..(61): PROSTAGLANDIN D RECEPTOR SIGNATURE domain identified by eMATRIX, accession number PR00854B, p-value=8.683e-09, raw score of 7.30
ILFWIIQLNLECSEFSWRLRQGRGIMLFFFPFLFFFETESHSVAQTGVQWCDLGSLQPPPPGLSDSPALASSVSWITDVRHHLWLIFVFLVETGFRHVGQASLKLPTSGDLPTLASQSAGITGVSHYAWLIFVFLVETEFHHVGQAGLELLAPSDPPA

SEQ ID NO: 15581 - protein, 65 aa, Homo sapiens
RRGELLTRLAGFPSYFLLPLLESWPLTIRDEAQPLTLQAQRPLVSETVLDAFWGSKPVGALFVLS

SEQ ID NO: 15582 - protein, 74 aa, Homo sapiens
AFKSVNLNNYMAVFISLYYKNYYNYLSHISNSTGFYPIFVSYFIMTIIHDLNCIFPLSEDYSGSCFVCGSGSGS

SEQ ID NO: 15583 - protein, 127 aa, Homo sapiens
DIKILIASPSATHIHKETTRATSSPYRDTQSRTASPNRAGKGVIEQTEKSHPRSPNVLSAALSQRTTVPEEELNPKILALQNAQRKRKMEHDGSLFQAVGIDLACRLLGQSMDESGLPQLTSYDCEV

SEQ ID NO: 15584 - protein, 229 aa, Homo sapiens
TVTVFQQTQIQEPTANATTTTATTDELKTVTKDRMEDIKILIASPSPTHIHKETTSATSSPYRDTQSRTASPNRAGKGVIEQTEKSHPRSPNVLSVALSQRTTVPEEELNPKILALQNAQRKRKMEHDGSLFQAVGIGTLLQQPDDHAATTSLSWKRVKGMQSSEQNGMEQKTIMLIPSDLACRLLGASMDESGLPQLTSHDCEVNAPIQGSRNLLQGEELLRALDQVN

SEQ ID NO: 15585 - protein, 67 aa, Homo sapiens
SSRRLRATCGDKLRRFDENFGAPDKRLKAEPAAPPAAPSTPALPPAVPKQLPAPPASPPSSAGDSVI

SEQ ID NO: 15586 - protein, 219 aa, Homo sapiens
  misc_feature (1)...(219): Xaa = X or * as defined in Table 2
SGCLLSPPSVGRQNSPVELGGAGLSRAGWAPQERGRAALLLISPGPNVRGGPDWLPSVLQMRGLPLWDLGGRPDVGRMSPGGRPGSCWATQLRFHISSLAPLFSWAGRSGSRLNPSTLGGRGGPITRSGDRDHPGXHGETLSLLKIQKISQACWRCACSPSYGRLRQENGVNPGGGACREQRSGHCTPAWATEQDSVSKKKKKKSGSTIRLKHILHKII

SEQ ID NO: 15587 - protein, 20 aa, Homo sapiens
  DOMAIN (1)..(19): S-adenosylmethionine synthetase domain identified by PFam, accession name S-AdoMet_synt, E-value=0.00049, PFam score of 9.5
QHDEEVCLDEMRDALKEKVT

SEQ ID NO: 15588 - protein, 72 aa, Homo sapiens
  DOMAIN (11)..(57): kw TRANSCRIPTASE REVERSE II ORF2 domain identified by eMATRIX, accession number DM01354O, p-value=7.102e-14, raw score of 8.73
ITSKKHTNQERKMKKPLVPKGFTIEFSQLCKKLRVPVFMKPFQKYGERGLFLNGFYEPGLTLIPKFGKNPGG

SEQ ID NO: 15589 - protein, 98 aa, Homo sapiens
  DOMAIN (3)..(86): Ubiquitin-conjugating enzyme domain identified by PFam, accession name UQ_con, E-value=0.0013, PFam score of -35.6
QWSYLPQVMFTGENIPVHPHVYSNGHICLSILTEDWSPALSVQSVCLSIISMLSSCKEKRRPPDNSFYVRTCNKNPKKTKWWYHGKFEHRDIHKGKKM

SEQ ID NO: 15590 - protein, 156 aa, Homo sapiens
  DOMAIN (4)..(146): Ubiquitin-conjugating enzyme domain identified by PFam, accession name UQ_con, E-value=3.9e-11, PFam score of 50.4
DGSIMASMQKRLQKELLALQNDPPPGMTLNEKSVQNSITQWIVYMEGAPCTLYEGEKFQLLFKCRRRYPFDSSQGMFTGENITDHPHVYSNGHMCLSILTKNWFPALSVQSVCLSIISMLSSCKEKTTDHPDNSFYVRTCNKNPKKTKWWYHDDTC

SEQ ID NO: 15591 - protein, 77 aa, Homo sapiens
WRQGLTLSPRPECSGAIMAHCNLGLLASSHTPTSPSRVAGITGVRPHPAFFLMLAFLLLDQLQKQLILCHLISSEFN

SEQ ID NO: 15592 - protein, 121 aa, Homo sapiens
HERKAQPAGEGRTHMTKSDSLPSFRVSTLPLESHHPDPNTMGGASHRDRALSVTATVRETNGNDPAPTQPPHASNHELAYNVSLPSHLTLLISHHLLHLIIIYSSCDIIYHYNTHGQHDAH

SEQ ID NO: 15593 - protein, 67 aa, Homo sapiens
GTRSNSGDYEILYWDIPNGCKLIRNRSDCKDIDWTTYTCVLGFQVFGVWPQGSDGTDINALVRSHNI

SEQ ID NO: 15594 - protein, 110 aa, Homo sapiens
  DOMAIN (63)..(90): Serpins proteins domain identified by eMATRIX, accession number BL00284D, p-value=2.957e-20, raw score of 16.34
  DOMAIN (4)..(110): Serpins (serine protease inhibitors) domain identified by PFam, accession name serpin, E-value=9e-42, PFam score of 143.8
ARVKRLGMFNIQHCKKLSSWVLLMKYLGNATAIFFLPDEGKLQHLENELTHDIITKFLETFCLHFPKLSITGTYDLKSVLGQLGITKVFSNGADLSGVTEEAPLKLSKAD

SEQ ID NO: 15595 - protein, 283 aa, Homo sapiens
  DOMAIN (81)..(123): Serpins proteins domain identified by eMATRIX, accession number BL00284C, p-value=1.000e-34, raw score of 28.56
  DOMAIN (11)..(208): Serpins (serine protease inhibitors) domain identified by PFam, accession name serpin, E-value=2.4e-106, PFam score of 362.1
  misc_feature (1)...(283): Xaa = X or * as defined in Table 2
EYRRFLVDRHLQLTTGNGLFLSEGLYLVDKFLEDVGRLYHSEALTVNFGDTEEAKKQINDYVEKGTQGKIVDLVKELDRDTVFALVNYIFFKGKWERPFEVKDTEEEDFHVDQVTTVKVPMMKRLGMFNIQHCKKLSSWVLLMKYLGNATAIFFLPDEGKLQHLENELTHDIITKFLENEDRRSASLHLPKLSITGTYDLKSVLGQLGITKVFGRGSQHEKRRTEATKECRKTQNNRGTERVATATXTHNQKRKRAQQGNTREKENGKQRQEGPFVFLMIEQN

SEQ ID NO: 15596 - protein, 51 aa, Homo sapiens
  DOMAIN (1)..(51): gag gene protein p24 domain identified by PFam, accession name gag_p24, E-value=7.7e-14, PFam score of 56.4
QIRNCCLRAWEKIQDLGTTYQSFNSIRQGSKEPYPDFIARLQDAAQKALTD

SEQ ID NO: 15597 - protein, 101 aa, Homo sapiens
  DOMAIN (26)..(54): !!!! PROTEIN ALU SUBFAMILY WARNING ENTRY NUCLEAR PHOSPHO domain identified by eMATRIX, accession number PD02454B, p-value= 2.193e-12, raw score of 11.61
  misc_feature (1)...(101): Xaa = X or * as defined in Table 2
FQKIGPGAVAHACNPSTLGGRSRRITRSGGRDHPGXHSETPSLLKIQKLAGRGGGCLXSQLLWRLRQENGVNPGGGACSEPRSRHCTPAWVTERDSVSKKK

SEQ ID NO: 15598 - protein, 119 aa, Homo sapiens
LTWSACYWRDILRIQLWIAADILLRMLEEALLYSEYQNISNTGLSSQGLLILAELIPAIKRTLARLLVIIVSLDYGIEKPHLGTVMHRVIGLRLLYLIFADAEGGIRDIEGSNHSAGGL

SEQ ID NO: 15599 - protein, 110 aa, Homo sapiens
LTWSACYWKDILRIQFWIAADIRLGMLEKAVLYSEHQNIRNTGLSSQGLLIFAESIPAIKRTLARLLVIIASLDYGIEKPHLGTGMHRVIGLMLLYLIFANAESVIRVIG

SEQ ID NO: 15600 - protein, 62 aa, Homo sapiens; identical to SEQ ID NO: 15243

SEQ ID NO: 15601 - protein, 380 aa, Homo sapiens
  misc_feature (1)...(380): Xaa = X or * as defined in Table 2
VRCRPVRNSRVDPRVRMAAVFLVTLYEYSPLFYIAVVFTCFIVTTGLVLGWFGWDVPVILRNSEETQFSTRVFKKQMRQVKNPFGLEITNPSSASITTGITLTTDCLEDSLLTCYWGCSVQKLYEALQKHVYCFRISTPQALEDALYSEYLYQEQYFILSSDIPISTENXTSYGXSVANLLIILGILEACLLLQNKHSPCIRTCSVYRISVSGTGFACFRLIYPLALIIRLLMDKVPLTYXSFLGYXKHVYCFRISTPQALEDALWSEYLYQEQHFIKKDSKEEIYCQLPRDTNIDDFGTVPRSRYPLVALLTLSDEDDREIYDIISMVSVIHIPDRTYKLSCRILYQYLLLAQGQFHDLKQLFMSANNNFTPSNNSSSE

SEQ ID NO: 15602 - protein, 165 aa, Homo sapiens
  DOMAIN (59)..(114): Actins proteins domain identified by eMATRIX, accession number BL00406D, p-value=1.000e-40, raw score of 12.58
  DOMAIN (1)..(165): Actin domain identified by PFam, accession name actin, E- value=3.9e-117, PFam score of 385.7
DIKEKLCYVALDFEQEMATAASSSSLEKSYELPDGQVITIGNERFRCPEALFQPSFLGMESCGIHETTFNSIMKCDVDIRKDLYANTVLSGGTTMYPGIADRMQKEITALAPSTMKIKIIAPPERKYSVWIGGSILASLSTFQQMWISKQEYDESGPSIVHRKCF

SEQ ID NO: 15603 - protein, 160 aa, Homo sapiens
  DOMAIN (54)..(109): Actins proteins domain identified by eMATRIX, accession number BL00406D, p-value=1.000e-40, raw score of 12.58
  DOMAIN (1)..(160): Actin domain identified by PFam, accession name actin, E- value=3.9e-112, PFam score of 369.3
LCYVALDFEQEMATAASSSSLEKSYQLPDGQVITIGNERFRCPEALFQPSFLGMESCGIHETTFNSIMKCDVDIRKDLYANTVLSGGTTMYPGIADRMQKEITALAPSTMKIKIIAPPERKYSVWIGGSILASLSTFQQMWISKQEYDESGPSIVHRKCF

SEQ ID NO: 15604 - protein, 397 aa, Homo sapiens
  DOMAIN (93)..(148): Actins proteins domain identified by eMATRIX, accession number BL00406B, p-value=1.000e-40, raw score of 5.47
  DOMAIN (9)..(397): Actin domain identified by PFam, accession name actin, E- value=1.6e-203, PFam score of 669.1
LPAQKLDTMCDEDETTALVCDNGSGLVKAGFAGDDAPRAVFPSIVGRPRHQGVMVGMGQKDSYVGDEAQSKRGILTLKYPIEHGIITNWDDMEKIWHHTFYNELRVAPEEHPTLLTEAPLNPKANREKMTQIMFETFNVPAMYVAIQAVLSLYASGRTTGIVLDSGDGVTHNVPIYEGYALPHAIMRLDLAGRDLTDYLMKILTERGYSFVTTAEREIVRDIKEKLCYVALDFENEMATGAPSIHPPMEKSYELPDGQVITIGNERFRCPHTLFQPSFIGMESAGIHETTYNSIMKCDIDIRKDLYANNVMFGGHPRLYPWEFADRMQERDSPALAPQAPMEDQGFIRPRRSAKYSVWIGRLPSWPSLSHLPSKMWITEAGSTDEAGPFPSSNRKCF

SEQ ID NO: 15605 - protein, 75 aa, Homo sapiens
GRVDGNWAVNEGLSIFVILVWLGLNVFLFVWYYRVYDIPPKFFYTRKLLGVSINSIPCNIGWFTFLIRHSCSSSC

SEQ ID NO: 15606 - protein, 123 aa, Homo sapiens
  DOMAIN (29)..(111): Immunoglobulin domain identified by PFam, accession name ig, E-value=0.0041, PFam score of 15.1
GTSSEPVFLLSSNSSLRPAEPRFSLVDATSLHIESLSLGDEGIYTCQEILNVTQWFQVWLQVASGPYQIEVHIVATGTLPNGTLYAARGSQVDFSCNSSSRPPPVVEWWFQALNSSSESFGHN

SEQ ID NO: 15607 - protein, 138 aa, Homo sapiens
  DOMAIN (74)..(90): MEMBRANE ALANYL DIPEPTIDASE (M1) FAMILY SIGNATURE domain identified by eMATRIX, accession number PR00756D, p-value=1.529e- 21, raw score of 10.58
  DOMAIN (1)..(126): Peptidase family M1 domain identified by PFam, accession name Peptidase_M1, E-value=8.6e-79, PFam score of 228.7
NQTHYALQASLISLDFYEKHFDIYYPLSKLDLIAIPDFAPGAMENWGLITYRETSLLFDPKTSSASDKLWVTRVIAHELAHQWFGNLVTMEWWNDIWLNEGFAKYMELIAVNATYPELQFDDYFLNVCFEVITKDSLN

SEQ ID NO: 15608 - protein, 175 aa, Homo sapiens
  DOMAIN (100)..(134): !!!! PROTEIN ALU SUBFAMILY WARNING ENTRY NUCLEAR PHOSPHO domain identified by eMATRIX, accession number PD02454A, p-value= 6.087e-09, raw score of 20.81
  misc_feature (1)...(175): Xaa = X or * as defined in Table 2
WEMVEIWSYSSSEQEHQLIKLSYQRIKPLPHAHWWPFNPSGLPPEASKXPPGXTLLGIFLGKKAXLQTFPLNYIRLENMQPRHGGSCPVIPTLWKAEVGRSLELRSLRPAWATRRNPISTKNPKLAGGARAHLXSPGTPEAEVGGSPEPGGRQGSSELRSRHCTPAWQHSETPIS

SEQ ID NO: 15609 - protein, 95 aa, Homo sapiens
ECVHWRTAPRPFALCLAKLTVETCPRLVSDQSLWHRKTWPPKKKFWNWKPDNFGRLRQENGVNPGGGACSEPRSHHCTPAWVTEQDSVSKKKKKK

SEQ ID NO: 15610 - protein, 131 aa, Homo sapiens
LNTGEQKDMTEFFTDLITKIEEMSPELKNTVKSLFGGVITNNVVSLDCEHVSQTAEEFYTVRCQVADMKNIYESLDEVTIKDTLEGDNMYTCSHCGKKVRAEKRACFKKLPRILSFNTMRYTFNMVTMMKE

SEQ ID NO: 15611 - protein, 184 aa, Homo sapiens
MESTYMPINSGLDKENVESECKAYNPRPFCKTYTMDKQPLNTGEQKDMTEFFTDLITKIEEMSPELSLRCEELHLHAENLSRRVWELLMLLPTCPNMLMAFQNISDEQGSYSDLYPDSDDSSEDQVENSKNSWSCKISSNFTSSSSKTIWYFSAVWEQLRYTLDNNVLKKSVIIQKDSESYEYD

SEQ ID NO: 15612 - protein, 300 aa, Homo sapiens
MSLSSGASGGKGVDANPVETYDSGDEWDIGVGNLIIDLDADLEKDQQKLEMSGSKEVGIPAPNAVATLPDNIKFVTPVPGPQGKEGKSKSKRSKSGKDTSKPTPGTSLFTPSEGAASKKEVQGRSGDGANAGGLVAAIAPKGSEKAAKASRSVAGSKKEKENSSSKSKKERSEGVGTCSEKDPGVLQPVPLGGRGGQYDGSAGVDTGAVEPLGSIAIEPGAALNPLGTKPEPEEGENECRLLKKVKSEKMESPVSTPAVLPIHLLVPVVNNDISSPCEQIMVRTRSVGVNTCDVGSGHRA

SEQ ID NO: 15613 - protein, 135 aa, Homo sapiens
  DOMAIN (98)..(113): FORMYL-METHIONYL PEPTIDE RECEPTOR SIGNATURE domain identified by eMATRIX, accession number PR00526E, p-value=2.000e-18, raw score of 12.37
AFFMARKAMGGHWTFSWLLCNFQITIQDINVIGTDYLTVLNAMHRCVCLLRPVWNHNHHTVSPVPTGMIGPWVMALLLTLPVIIRVTTVPGKTVTVACTFNFSPWTNDPIERINVADAMLTARGIIRFIIDFSAP

SEQ ID NO: 15614 - protein, 379 aa, Homo sapiens
  DOMAIN (80)..(102): RHODOPSIN-LIKE GPCR SUPERFAMILY SIGNATURE domain identified by eMATRIX, accession number PR00237B, p-value=3.045e-13, raw score of 13.50
  DOMAIN (63)..(200): 7 transmembrane receptor (rhodopsin family) domain identified by PFam, accession name 7tm_1, E-value=1.7e-37, PFam score of 121.3
  misc_feature (1)...(379): Xaa = X or * as defined in Table 2
PDLELPRARPQLVNSPGADKMETNSSLPTNISGGTPAVSAGYLFLDIITYLVFAVTFVLGVLGNGLVIWVAGFRMTHTVTTISYLNLAVADFCFTSTLPFFMVRKAMGGHWPFGWFLCKFVFTIVDINLFGSVFLIALIALDRCVCVLHPVWTQNHRTVSLAKKVIIGPWVMALLLTLPVIIRVTTVPGKTGTVACTFNFSPWTNDPKERINVAVAMLTVRGIIRFIIGFSAPMSIVAVSYGLIATKIHKQGLIKVQVRPXGALSFVAKAFFLCWSPYQVVAPXXPTSQESREVNCKGMYQRKLGIAVDVNKVPLAFFNSCAFNPMVLVFMGQDFRERLIHALPAKSGRGPLTEDFNPKPVPQLTNSTLPSAEVALQAK

SEQ ID NO: 15615 - protein, 128 aa, Homo sapiens
  DOMAIN (24)..(86): SAM domain (Sterile alpha motif) domain identified by PFam, accession name SAM, E-value=0.032, PFam score of 11.3
NGMLGNRFKSGFIFKVYLQETAGETWSVEQVCSWLVEKNLGELVHRFQEEEVSGAALLALNDRMVQQLVKKIGHQAVLMDLIKKYKQNTQGLKSPENPKKAALVMQTEAARDYRDEESSSPARHGEQM

SEQ ID NO: 15616 - protein, 97 aa, Homo sapiens
  DOMAIN (50)..(91): TRANSFERASE GLYCOSYLTRANSFERASE domain identified by eMATRIX, accession number PD01966D, p-value=8.714e-09, raw score of 19.10
  DOMAIN (1)..(96): Queuine tRNA-ribosyltransferase domain identified by PFam, accession name TGT, E-value=0.0016, PFam score of -117.7
IQGGLDADLRATCLEEMTKRDVPGFAIGGLSGGESKSQFWRMVALSTSRLPKDKPRYLMGVGYVVDREARALPVGSGFLGTPYPAWGGGIWGKRTQV

SEQ ID NO: 15617 - protein, 57 aa, Homo sapiens
SEVSAMVFLFFFFCFFEMESRSAAQAGVQWCNLGSLQALPPRFTPFSCLSLPSSWDY

SEQ ID NO: 15618 - protein, 576 aa, Homo sapiens
  DOMAIN (330)..(378): Intermediate filaments proteins domain identified by eMATRIX, accession number BL00226B, p-value=6.651e-09, raw score of 23.86
KKSIQQLVPEYNEKQTPESLPQNSNPDWHPTNLTLSDETCQRSKNLKVGDKSPSVSPSMPENQSATKELGQMNLTEREKMDTGVVLLSGNDTLHDLCQSQLPENKESKEDYVFYLTVLSSLTERLDFAAEQDLELTSEEEQERLKGCENKQPQDKAIFKTCSPTEKTPKKQNKQINLPLLHLQKTSQEPEMAKDCDREDIPIYPVLPHVQKSEEMRIEQGKLEWKNQLKLVINELKQRFGEIYEKYKIPACPEEEPLLDNSTRGTDVKDIPFNLTNNIPGCEEEDASEISVSVILLAYQESKKDTFCLCEHLLKLKNNHCDQLTVKLKQMENMVSVLQNELSETKKTKLQLELQKIEWEKELYDLRLALKQENEEKRNADMLYNKDSEQLRIKEEECGKVVETKQQLKWNLRRLVKELRTVRNNLDLVVQERNDAQKQLSEEQDARILQDQILTSKQKELEMAQKKRNPEFHSAAKNLQAESEKQILSLQEKNKELMDEYNHLKERMDQCEKEKAGRKVVMREFQQEWTDLLKQQPTSEATSRCHINLDETQDSKKKLGQIRSEVCMKHNMSTVNL

SEQ ID NO: 15619 - protein, 61 aa, Homo sapiens
RTRGRTRGILCHMQISYAQVETMRQSIEELHYYELELYVLQFHHLQVVWENHLCIFFYYLK

SEQ ID NO: 15620 - protein, 139 aa, Homo sapiens
  DOMAIN (14)..(42): !!!! PROTEIN ALU SUBFAMILY WARNING ENTRY NUCLEAR PHOSPHO domain identified by eMATRIX, accession number PD02454B, p-value= 4.536e-22, raw score of 11.61
  misc_feature (1)...(139): Xaa = X or * as defined in Table 2
SQHFGKLRQEDHLRSGVREQPGQHGKTPYLLKIQKLARRSGACLXSQLLRRLRQENRLNPGGVGCSEPRLHHCTTAWTLQXDPVSKKLKKKYIERQRYHQHMKHPWSTKIQYVCMDGXHRSVEKQIIQTLCMFVFTHTY

SEQ ID NO: 15621 - protein, 105 aa, Homo sapiens
RAALVLGGPKFASKTPRPVTEPLVLLSGMQLAKLIRQRKVKCIDDVQAYINRIKDVNPMINGIDKHRFEEAMNEAHAVHQKLAEKHVDVISLKNTWTFLVVALNA

SEQ ID NO: 15622 - protein, 65 aa, Homo sapiens
STLIVTHALHKVKVGKSPPVRGWLSGKVSLPCHFSTMPTLPPSYNTSEFLRIKWSKIEVDITGIH

SEQ ID NO: 15623 - protein, 84 aa, Homo sapiens
QGDSLDDTWWNQQQPLKESLSWFQSLSPGIGFVDGSSCGAVREELAALTVHCLIFRFPCGLGLGKGMDDGSLERILVGELLTSQ

SEQ ID NO: 15624 - protein, 283 aa, Homo sapiens
MPESWLAAFPPYGDIKKVVGLQLKEGLHQNLTMQDSIQIFDFQLPGLLRPSSVLWTLKPYHTAGLASDRDSYKGILACMPCMFGSRRSPLRDIKSHQADLELEVKNSLDTIHRLESELKKQSKIQSQMKVEKAHLEEEIAELKKSQAQDKAKLLEMQESIKDLSAIRADLANKLAEEERAKKAVLKDLSDLTAQAKSRDEETATIITQLKLERDVHQRELKDLTSSLQSVKTKHEQNIQELMKHFKKEKSEAENHIRTLKVPLLNYPDDTEGIFLVAHEVNKA

SEQ ID NO: 15625 - protein, 331 aa, Homo sapiens
MWVWTAEGPTIPQFLHSVGRTVQAANPGEWVLEMPGYLSACGAERVFIYYNICPGRMGLHWLLNQEKHISIEEEHLRRMEEARLQLKDQLLCLETEQESILGVIGKEIDAACKTFSKDSVEKLKNIFMLAIDTVSTRVVVLCSSIDYALRVYGGSNFTDYGLESELKKQSKIQSQMKVEKAHLEEEIAELKKSQAQDKAKLLEMQESIKDLSAIRADLANKLAEEERAKKAVLKDLSDLTAQAKSRDEETATIITQLKLERDVHQRELKDLTSSLQSVKTKHEQNIQELMKHFKKEKSEAENHIRTLKVPLLNYPDDTEGIFLVAHEVNKA

SEQ ID NO: 15626 - protein, 201 aa, Homo sapiens
SIKCTLVSIYILIILGWQRKNCFIFYHRTYKIKYSILILFSRLKKEAPAKEQEPVSKEIARPNMAERETETSNSESKQDKAASSKEKNGCNANSFEGSSTTKSEESITVSDKENETCLADQETGSKNIVSCDSNIGADKVEKKKQIQHVCQEMELKMCQSSENIILSDQIKDHNSSEARFSSKNIKDLRLASDNVSIDPFF

SEQ ID NO: 15627 - protein, 30 aa, Homo sapiens
MDISGTKCDFTVQVQLRFCLSETKATQPTN

SEQ ID NO: 15628 - protein, 209 aa, Homo sapiens
HASADLWADISQRFRETCFAFALTPQQVQQISSSMDISGTKCDFTVQVQLRFCLSETSCPQEDHFPPNLCVKVNTKPCSLPGYLPPTKNGVEPKRPSRPINITSLVRLSTTVPNTIVVSWTAEIGRNYSMAVYLVKQLSSTVLLQRLRAKGIRNPDHSRALIKEKLTADPDSEIATTSLRVSLLCPLGKMRLTIPCRALTCSHLQCFDG

SEQ ID NO: 15629 - protein, 62 aa, Homo sapiens
NTIVVSWTAEIGRNYSMAVYLVKQLSSTVLLQRLRAKGIRNPDHSRALSTYDKLISLIQLFC

SEQ ID NO: 15630 - protein, 765 aa, Homo sapiens
  DOMAIN (722)..(733): VINCULIN SIGNATURE domain identified by eMATRIX, accession number PR00806A, p-value=9.384e-09, raw score of 6.63
VFEVVERVEELRRKWPVAWGKLDDGSIGVVTPYADQVFRIRAELRKKRLSDVNVERVLNVQGKQFRVLFLSTVRTRHTCKHKQTPIKKKEQLLEDSTEDLDYGFLSNYKLLNTAITRAQSLVAVVGDPIALCSIGRCRKFWERFIALCHENSSLHGITFEQIKAQLEALELKKTYVLNPLAPEFIPRALRLQHSGSTNKQQQSPPKGKSLHHTQNDHFQNDGIVQPNPSVLIGNPIRAYTPPPPLGPHPNLGKSPSPVQRIDPHTGTSILYVPAVYGGNVVMSVPLPVPWTGYQGRFAVDPRIITHQAAMAYNMNLLQTHGRGSPIPYGLGHHPPVTIGQPQNQHQEKDQHEQNRNGKSDTNNSGPEINKIRTPEKKPTEPKQLPRPPFPIPQQHTLLNQQQNNLPEQPNQIPPQPNQAGPNNAFFNSAVAHRPQSPPAEAVIPEQQPPPMLQEGHSPLRAIAQPGPILPSHLNSFIDENPSGLPIGEALDRIHGSVALETLRQQQARFQQWSEHHAFLSQGSAPYPHHHHPHLQHLPQPPLGLHQPPVRADWKLTSSAEDEVETTYSRLEIDEEAGEEKLEASRGWFMRFKERSHPHNIKVQGETASANIEAAASYPEDLAKIIDEDGYTKLQIFCVDKTASYWKKMLSRTFSAPPKTVKPPEDQLKSENLEVSSSFNYSVLQHLGQFPPLMPNKQIAESANSSSPQSSAGGKPAMSYASALRAPPKPRPPPEQAKKSSDPLSLFQELSLGSSSGSNGFYSYFK

SEQ ID NO: 15631 - protein, 34 aa, Homo sapiens
AHFLHIVLVLMPVIPATREDEAGESLEPGRWRLQ

SEQ ID NO: 15632 - protein, 1943 aa, Homo sapiens
  DOMAIN (194)..(205): Zinc finger C-x8-C-x5-C-x3-H type (and similar) domain identified by eMATRIX, accession number PF00642, p-value=7.750e-11, raw score of 11.59
  DOMAIN (179)..(208): Zinc finger C-x8-C-x5-C-x3-H type domain identified by PFam, accession name zf-CCCH, E-value=3.1e-12, PFam score of 48.5
VMEDRRAEKSCEQACESLKRQDYEMALKHCTEALLSLGQYSMADFTGPCPLEIERITIESLLYRIASFLQLKNYVQADEDCRHVLGEGLAKGEDAFRAVLCCMQLKGKLQPVSTILAKSLTGESLNGMVTKDLTRLKTLLSETETATSNALSGYHVEDLDEGSCNGWHFRPPPRGITSSEEYTLCKRFLEQGICRYGAQCTSAHSQEELAEWQKRYASRLIKLKQQNENKQLSGSYMETLIEKWMNSLSPEKVLSECIEGVKVEHNPDLSVTVSTKKSHQTWTFALTCKPARMLYRVALLYDAHRPHFSIIAISAGDSTTQVSQEVPENCQEWIGGKMAQNGLDHYVYKVGIAFNTEIFGTFRQTIVFDFGLEPVLMQRVMIDAASTEDLEYLMHAKQQLVTTAKRWDSSSKTIIDFEPNETTDLEKSLLIRYQIPLSADQLFTQSVLDKSLTKSNYQSRLHDLLYIEEIAQYKEISKFNLKVQLQILASFMLTGVSGGAKYAQNGQLFGRFKLTETLSEDTLAGRLVMTKVNAVYLLPVPKQKLVQTQGTKEKVYEATIEEKTKEYIFLRLSRECCEELNLRPDCDTQVELQFQLNRLPLCEMHYALDRIKDNGVLFPDISMTPTIPWSPNRQWDEQLDPRLNAKQKEAVLAITTPLAIQLPPVLIIGPYGTGKTFTLAQAVKHILQQQETRILICTHSNSAADLYIKDYLHPYVEAGNPQARPLRVYFRNRWVKTVHPVVHQYCLISSAHSTFQMPQKEDILKHRVVVVTLNTSQYLCQLDLEPGFFTHILLDEAAQAMECETIMPLALATQNTRIVLAGDHMQLSPFVYSEFARERNLHVSLLDRLYEHYPAEFPCRILLCENYRSHEAIINYTSELFYEGKLMASGKQPAHKDFYPLTFFTARGEDVQEKNSTAFYNNAEVFEVVERVEELRRKWPVAWGKLDDGSIGVVTPYADQVFRIRAELRKKRLSDVNVERVLNVQGKQFRVLFLSTVRTRHTCKHKQTPIKKKEQLLEDSTEDLDYGFLSNYKLLNTAITRAQSLVAVVGDPIALCSIGRCRKFWERFIALCHENSSLHGITFEQIKAQLEALELKKTYVLNPLAPEFIPRALRLQHSGSTNKQQQSPPKGKSLHHTQNDHFQNDGIVQPNPSVLIGNPIRAYTPPPPLGPHPNLGKSPSPVQRIDPHTGTSILYVPAVYGGNVVMSVPLPVPWTGYQGRFAVDPRIITHQAAMAYNMNLLQTHGRGSPIPYGLGHHPPVTIGQPQNQHQEKDQHEQNRNGKSDTNNSGPEINKIRTPEKKPTEPKQVDLESNPQNRSPESRPSVVYPSTKFPRKDNLNPRHINLPLPAPHAQYAIPNRHFHPLPQLPRPPFPIPQQHTLLNQQQNNLPEQPNQIPPQPNQVVQQQSQLNQQPQQPPPQLSPAYQAGPNNAFFNSAVAHRPQSPPAEAVIPEQQPPPMLQEGHSPLRAIAQPGPILPSHLNSFIDENPSGLPIGEALDRIHGSVALETLRQQQARFQQWSEHHAFLSQGSVPYPHHHHPHLQHLPQPPLGLHQPPVRADWKLTSSAEDEVETTYSRFQDLIRELSHRDQSETRELAEMPPPQSRLLQYRQVQSRSPPAVPSPPSSTDHSSHFSNFNDNSRDIEVASNPAFPQRLPPQIFNSPFSLPSEHLAPPPLKYLAPDGAWTFANLQQNHLMGPGFPYGLPPLPHRPPQNPFVQIQNHQHAIGQEPFHPLSSRTVSSSSLPSLEEYEPRGPGRPLYQRRISSSSVQPCSEEVSTPQDSLAQCKELQDHSNQSSFNFSSPESWVNTTSSTPYQNIPCNGSSRTAQPRELIAPPKTVKPPEDQLKSENLEVSSSFNYSVLQHLGQFPPLMPNKQIAESANSSSPQSSAGGKPAMSYASALRAPPKPRPPPEQAKKSSDPLSLFQELSLGSSSGSNGFYSYFK

SEQ ID NO: 15633 - protein, 250 aa, Homo sapiens
  DOMAIN (129)..(229): Kelch motif domain identified by PFam, accession name Kelch, E-value=7.9e-12, PFam score of 52.7
KYVNNFILKNFPALLSTGEFLKLPFERLAFVLSSNSLKHCTELELFKAACRWLRLEDPRMDYAAKLMKNIRFPLMTPQDLINYVQTVDFMRTDNTCVNLLLEASNYQMMPYMQPVMQSDRTAIRSDSTHLVTLGGVLRQQLVVSKELRMYDERAQEWRSLAPMDAPRYQHGIAVIGNFLYVVGGQSNYDTKGKPAVDTVFRFDPRYNKWMQVASLNEKRTFFHLSACKAHLYAVGRHSAAGELATVECYN

SEQ ID NO: 15634 - protein, 71 aa, Homo sapiens
  DOMAIN (25)..(57): GNS1/SUR4 family proteins domain identified by eMATRIX, accession number BL01188A, p-value=9.100e-09, raw score of 18.82
HIFLTSWNFYINRELHLNNNLLRVLPFELGKLFQLQTLGLKGMTSIFVLLMVCEYVFESKEAKKLSARGFF

SEQ ID NO: 15635 - protein, 72 aa, Homo sapiens
PTRPGKYIVTGGEDDLVTVWSFVDCRVIARGHGHKSWVSVVAFDPYTTSVEEGDPMEFSGSDEDFQDLLHFG

SEQ ID NO: 15636 - protein, 37 aa, Homo sapiens
WVPFFCDLRQGQPVYPITGGFRQPYPSSLSVDTSMSR

SEQ ID NO: 15637 - protein, 47 aa, Homo sapiens
SDGSASKGKHYFSEPVHILKRAFARTVSGVSHVLKNLSFSLQSSDTF

SEQ ID NO: 15638 - protein, 177 aa, Homo sapiens; identical to SEQ ID NO: 9406
  DOMAIN (91)..(121): Ribosomal protein L3 proteins domain identified by eMATRIX, accession number BL00474B, p-value=7.500e-24, raw score of 21.72
  DOMAIN (61)..(177): Ribosomal protein L3 domain identified by PFam, accession name Ribosomal_L3, E-value=3.7e-56, PFam score of 196.9

SEQ ID NO: 15639 - protein, 116 aa, Homo sapiens
  DOMAIN (28)..(58): Ribosomal protein L3 proteins domain identified by eMATRIX, accession number BL00474B, p-value=4.522e-20, raw score of 21.72
  DOMAIN (3)..(75): Ribosomal protein L3 domain identified by PFam, accession name Ribosomal_L3, E-value=1.1e-33, PFam score of 119.4
TRHIVREVDRPGSKVNKKEVVEAVTIVENTPMVVVGIVGYVETPRGLRTFKTVFAEHISDECKRRFYKNWNKSKKIDLKFIDTTSKLCHGRLQTMEEKKAFMGPLKKDRIAKEEGA

SEQ ID NO: 15640 - protein, 311 aa, Homo sapiens
  DOMAIN (232)..(267): Ribosomal protein L3 proteins domain identified by eMATRIX, accession number BL00474C, p-value=7.623e-18, raw score of 21.74
  DOMAIN (66)..(311): Ribosomal protein L3 domain identified by PFam, accession name Ribosomal_L3, E-value=6.3e-21, PFam score of 75.3
  misc_feature (1)...(311): Xaa = X or * as defined in Table 2
VNHAPAHASDGVMSHRKFSAPRHCSLGFLPRKRSSRHRGKVKSFPMDDPSKPVHLTAFLGYKAGMTHIVREVDRPGSKVNKKEVVEAVTIVXDTTHWCLLGIVGYVGNPSEGLRDTFKTCLLLEHISYXMPRRRFLXRIWALKSXEGRPLPKYCKEIGKDEDGKKPAWKKDFQQHXKKLLAQVHPCSIAQTQMRLLPLRQKKAHLMEIQVNGGTVARESWDWAREKLEQQVPVNQVFGQDEMIDVIGVTKGKGFKGVTRSWPTNXLPFKAHLGLSRVACFGAWHPARAHWHVARAGQKGYQPYTLLVHSDL

SEQ ID NO: 15641 - protein, 34 aa, Homo sapiens; identical to SEQ ID NO: 15631

SEQ ID NO: 15642 - protein, 125 aa, Homo sapiens
  DOMAIN (62)..(113): KH domain identified by PFam, accession name KH-domain, E- value=2.9e-07, PFam score of 37.5
QNIAHIIGPPNRCEHAAWIINDLFQSCRRGPPGPPGGPGMPQGARARERGQGTWDTPGGQMSFSIPAHKSGLVIGLGGDNVKAITQQTGALVEISRQLPPTGDPNYKLLIIRGSPQQIDHTKPRA

SEQ ID NO: 15643 - protein, 133 aa, Homo sapiens
LDVKLIEGLVVKAGTTVRFPAIIRGVPVPTAKWTTDGSEIKTDEHYTVETDNFSSVLTIKNCLRRDTGEYQITVSNAAGSKTVAVHLTVLDVPGPPTGPINILDVTPEHMTISWQPPKDDGGSPVINYIVEIQ

SEQ ID NO: 15644 - protein, 87 aa, Homo sapiens; identical to SEQ ID NO: 15579

SEQ ID NO: 15645 - protein, 158 aa, Homo sapiens; identical to SEQ ID NO: 15580
  DOMAIN (43)..(61): PROSTAGLANDIN D RECEPTOR SIGNATURE domain identified by eMATRIX, accession number PR00854B, p-value=8.683e-09, raw score of 7.30

SEQ ID NO: 15646 - protein, 66 aa, Homo sapiens
  misc_feature (1)...(66): Xaa = X or * as defined in Table 2
DALAFVIKVFAAEEVDGCSVTTGSHNHSVASGSNHRTRFCFTVYLSSIVSWRYXSCRCRECRGRAF

SEQ ID NO: 15647 - protein, 404 aa, Homo sapiens
  DOMAIN (111)..(136): Bromodomain proteins domain identified by eMATRIX, accession number BL00633B, p-value=9.775e-13, raw score of 13.82
  DOMAIN (80)..(169): Bromo domain identified by PFam, accession name bromodomain, E-value=6.3e-18, PFam score of 66.6
PGSPIVKSAKFVTDLLLHFIKDQTCYNIIPLYNSMKKKVLSDSEDEEKDADVPGTSTRKRKDHQPRRRLRNRAQSYDIQAWKKQCEELLNLIFQCEDSEPFRQPVDLLEYPDYRDIIDTPMDFATVRETLEAGNYESPMELCKDVRLIFSNSKAYTPSKRSRIYSMSLRLSAFFEEHISSVLSDYKSALRFYKRNTITKRRKKRNRSSSVSSSAASSPERKKRILKPQLKSESSTSAFSTPTRSIPPRHNAAQINGKTESSSVVRTRSNRVVVDPVVTEQPSTSSAAKTFITKANASAIPGKTILENSVKHSKALNTLSSPGQSSFSHGTRNNSAKENMEKEKPVKRKMKSSVLPKASTLSKSSAVIEQGGCKEQRFLYQGPFQVNGHGGQPSKLVKRGPGKET

SEQ ID NO: 15648 - protein, 52 aa, Homo sapiens
PVPEIKVVPHLPPITMEEVPPLSGTDADLLVPYDIYVLSPCCNLKCLIQACL

SEQ ID NO: 15649 - protein, 78 aa, Homo sapiens
PPMLGKDKKEKEKALKRKITKEEKELRLKLRPLYQFMSCKEFDDLFENMHKEKMLRAKIRELQRYRRNGITKMEESAE

SEQ ID NO: 15650 - protein, 47 aa, Homo sapiens
DISHLSADGYSSSDSFTSDPEQIGSNVTRQRSVFLSMKSMLNYLAAF

SEQ ID NO: 15651 - protein, 133 aa, Homo sapiens
SCYGFNVRGQVSDGGQLRSINGELYAPLQHNHVNVEGATHKQVVDLIRAREKELILTVLSVPPHEADNLYPSDDSLGQSFYDYTEKQAVPISVPRYKHVEQNGEKFVVYNVYMAGRQLCSKRYRQFAILHQNL

SEQ ID NO: 15652 - protein, 284 aa, Homo sapiens
MDVVDPDIFNRDPRDHYDLLQRLGGGTYGEVFKLFAKCYTCIHTYDAMRVLFLMTKSGSQLPRLKEKGKWYERVTGGRSANVHYIIVYCESVHFLPILLPTLSTKPLSSPELNAAASYVPFPPIIHIDTAASMCYLFHMYVGVRAGGGIGDEIEDPAGDEYELYRVVFDITFFFFVIVILLAIIQGLIIDAFGELRDQQEQVKEDMETKCFICGIGSDYFDTTPHGFETHTLEEHNLANYMFFLMYLINKDETEHTGQSRALCRAFRGMRETGDLVRALKELAV

SEQ ID NO: 15653 - protein, 235 aa, Homo sapiens
  DOMAIN (79)..(93): PROTEIN SH3 DOMAIN REPEAT PRESYNA domain identified by eMATRIX, accession number PD00289, p-value=1.310e-09, raw score of 9.97
  DOMAIN (24)..(116): PDZ domain (Also known as DHR or GLGF) domain identified by PFam, accession name PDZ, E-value=2.3e-09, PFam score of 44.6
GGGGGGSVLHCAGNGGGGGGGPRVVRIVKSESGYGFNVRGQVSEGGQLRSINGELYAPLQHVSAVLPGGADDRAGVRKGDRILEVNHVNVEGATHKQVVDLIRAGEKELILTVLSVPPHEADNLDPSDDSLGQSFYDYTEKQAVPISVPRYKHVEQNGEKFVVYNVYMAGRQLCSKRYREFAILHQNLKREFANFTFPRLPGKWPFSLSEQQLDARRRGLEEYLEKVCSIRVIGE

SEQ ID NO: 15654 - protein, 58 aa, Homo sapiens
DRVSLCCPGVQWHNLGSLQPLPPWFKRFSLLSLPSSWDHRRMPPHPANPCILSRHGVL

SEQ ID NO: 15655 - protein, 161 aa, Homo sapiens
  DOMAIN (31)..(47): Putative AMP-binding domain proteins domain identified by eMATRIX, accession number BL00455, p-value=3.625e-11, raw score of 13.31
GRDLDWDEEMAKAQSHDCVPVLSEHPLYILYTSGTTGLPKGVIRPTGGYAVMLHWSMSSIYGLQPGEVWWAASDLSWVVGHSYICYGPLLHGNTTVLYEGKPVGTPDAGAYFRVLAEHGVAALFTAPTAIRAIRQQDPGAALGKQYSLTRFKTLFVAGRTM

SEQ ID NO: 15656 - protein, 246 aa, Homo sapiens
  DOMAIN (162)..(178): Putative AMP-binding domain proteins domain identified by eMATRIX, accession number BL00455, p-value=3.625e-11, raw score of 13.31
  DOMAIN (14)..(240): AMP-binding enzyme domain identified by PFam, accession name AMP-binding, E-value=0.0023, PFam score of -216.1
QMAHAVMIRDIGSNSPVSKLAGVLVKHGIKKGDTVVIYMPMIPQAMYTMLACARIGAIHSLIFGGFASKELSSRIDHVKPKVVVTASFGIEPGRRVEYVPLVEEALKIGQHKPDKILIYNRPNMEAVPLAPGRDLDWDEEMAKAQSHDCVPVLSEHPLYILYTSGTTGLPKGVIRPTGGYAVMLHWSMSSIYGLQPGESQTDPSGGIPEEVIIVIGDDSSMLALVELPVRQIVEMEDSDTDNPDPV

SEQ ID NO: 15657 - protein, 46 aa, Homo sapiens [sequence omitted]

SEQ ID NO: 15658 - protein, 134 aa, Homo sapiens
GQEKLVPPSVELDVKLIEGLVVKAGTTVRFPAIIRGVPVPTAKWTTDGSEIKTDEHYTVETDNFSSVLTIKNCLRRDTGEYQITVSNAAGSKTVAAHLTVLDVPGPPTGPINILDVTPEHMTISWQPPKDDGGS

SEQ ID NO: 15659 - protein, 80 aa, Homo sapiens
TPSRCCCCRSAPTLVGVRTRGFNIPKQVSRSGLYRSPSMPDNLNRPSLKQVEKFKVGSIPDKVKKKYFSGQGKLRKVRTF

SEQ ID NO: 15660 - protein, 71 aa, Homo sapiens
QRRRGRGWTNCGSTLREDGHLPEPAFLHSAQEPRSGALACGKATGEHRAPRRPPGRVRSPAHPEPCPSSGV

SEQ ID NO: 15661 - protein, 131 aa, Homo sapiens
KIKHRPEEEPRWAAAGAQSAGPGAAEVAPPRPGTVAPGANGMTDSATANGDDRDPEIELFVKAGIDGESIGNCPFSQRLFMILWLKGVVFNVTTVDLKRKPADLHNLAPGTHPPFLTFNGDVKTDVNKIEE

SEQ ID NO: 15662 - protein, 54 aa, Homo sapiens [sequence omitted]

SEQ ID NO: 15663 - protein, 75 aa, Homo sapiens
  misc_feature (1)...(75): Xaa = X or * as defined in Table 2
HLVSSLAKGKLAVRQAPFARVPPQHPXVKVKNWDPLLQPPPCRGLALKVTGCRVLGTEGLPHLKDFPIRAATQPL

SEQ ID NO: 15664 - protein, 374 aa, Homo sapiens
  DOMAIN (5)..(257): Sodium:solute symporter family domain identified by PFam, accession name SSF, E-value=4.3e-05, PFam score of -77.7
MHKDWVVFDVSGEHKEALLHELQLCDSTLKPAAHGQTRLVDLSLSEHKAQGTGAHVYEERHQVSVSRTDDVGCVVPSECLRACGAEVGCSNIAYPKLVMELMPIGLRGLMIAVMLAALMSSLTSIFNSSSTLFTMDIWRRLRPRSGERELLLVGRTGIPSTPPAPQSRLSFLLPETPPLERYLLGLVVMDLWLVIVALIGVSVAWIPVLQDSNSGQLFIYMQSVTSSLAPPVTAVFVLGVFWRRANEQGAFWGLIAGLVVGATRLVLEFLNPAPPCGEPDTRPAVLGSIHYLHFAVALFALSGAVVVAGSLLTPPPQSVQIENLTWWTLAQDVPLGTKAGDGQTPQKHAFWARVCGFNAILLMCVNIFFYAYFA

SEQ ID NO: 15665 - protein, 399 aa, Homo sapiens
  DOMAIN (5)..(283): Sodium:solute symporter family domain identified by PFam, accession name SSF, E-value=0.00095, PFam score of -116.0
MHKDWVVFDVSGEHKEALLHELQLCDSTLKPAAHGQTRLVDLSLSEHKAQGTGAHVYEERHQVSVSRTDDVGCVVPSECLRACGAEVGCSNIAYPKLVMELMPIGFSGAGDFPGPPLSNPLFLEAFDPSGLRGLMIAVMLAALMSSLTSIFNSSSTLFTMDIWRRLRPRSGERELLLVGRTGIPSTPPAPQSRLSFLLPETPPLERYLLGLVVMDLWLVIVALIGVSVAWIPVLQDSNSGQLFIYMQSVTSSLAPPVTAVFVLGVFWRRANEQGAFWGLIAGLVVGATRLVLEFLNPAPPCGEPDTRPAVLGSIHYLHFGVALFALSGAVVVAGSLLTPPPQSVQIENLTWWTLAQDVPLGTKAGDGQTPQKHAFWARVCGFNAILLMCVNIFFYAYFA

SEQ ID NO: 15666 - protein, 208 aa, Homo sapiens
  DOMAIN (75)..(102): Zinc carboxypeptidases zinc-binding region 1 proteins. domain identified by eMATRIX, accession number BL00132E, p-value=8.875e- 25, raw score of 17.72
  DOMAIN (70)..(169): Zinc carboxypeptidase domain identified by PFam, accession name Zn_carbOpept, E-value=1.3e-23, PFam score of 90.9
MGCGIEFVTKSSKAIATKTKIDNWDLIKELLHSKRNYQYSKQTIYKELCGCSERSQGEVEILNLEPLDEGASMHPCDDTYCGPFPESEPEVKAVANFLRKHRKHIRAYLSFHAYAQMLLYPYSYKYATIPNFRCVESAAYKAVNALQSVYGVRYRYGPASTTLCSSAGSGNQIDTRQVKQEKSIQILLILCVQDLHNRVKSKEVAKAR

SEQ ID NO: 15667 - protein, 180 aa, Homo sapiens
  DOMAIN (51)..(125): Domain found in Dishevelled, Egl-10, and Ple domain identified by PFam, accession name DEP, E-value=3e-11, PFam score of 50.8
PHGPKTMEEGGSTGSAGSDSSTSGSGGAQQRELERMAEVLVTGEQLRLRLHEEKVIKDRRHHLKTYPNCFVAKELIDWLIEHKEASDRETAIKLMQKLADRGIIHHVCDEHKEFKDVKLFYRFRKDDGTFPLDNEVKAFMRGQRLYEKLMSPENTLLQPREEEGVKYERTFMASEFLDWL

SEQ ID NO: 15668 - protein, 145 aa, Homo sapiens
  DOMAIN (83)..(99): MEMBRANE ALANYL DIPEPTIDASE (M1) FAMILY SIGNATURE domain identified by eMATRIX, accession number PR00756D, p-value=1.529e- 21, raw score of 10.58
  DOMAIN (1)..(135): Peptidase family M1 domain identified by PFam, accession name Peptidase_M1, E-value=6.5e-84, PFam score of 243.6
SIYASPDKRNQTHYALQASLKLLDFYEKYFDIYYPLSKLDLIAIPDFAPGAMENWGLITYRETSLLFDPKTSSASDKLWVTRVIAHELAHQWFGNLVTMEWWNDIWLKEGFAKYMELIAVNATYPELQFDDYFLNVCFEVITKDS

SEQ ID NO: 15669 - protein, 65 aa, Homo sapiens
KYAFLVLHIYASIWEERRLFTTENTPIKYGSQIFTLVQPIHLPQKVAVVHCWGHQKGQDEIGQKN

SEQ ID NO: 15670 - protein, 119 aa, Homo sapiens
HELMLDKAPVLKVIVNSLKNMINTFVPSGKVMQVVDEKLPGLLGNFPGPFEEEMKGIAAVTDIPLGKVHLEALKKKVIKFFYKFPLRCDIHTAQVLYVLDIQHRCCMSLDIHTAQVHRS

SEQ ID NO: 15671 - protein, 421 aa, Homo sapiens
RTRGRTRGELVLESGEWRWLLERCRPGGAVALILLAAVVSCAVSQHAPPWTEDCRKSTYPPSRPTYRGAVPWDTIHVLDLPPYKRWDELMLDMAPVLSKVIVNSLKNMINTFVPSGKIMQVVDEKLPGLLGNFPGPFEEEMKGIAAVSLDIPLGEIISFNIFYELFTICTSIVAEDKKGHLIHGRNMGFGVFLVWNINNDTWVITEQLKPLTVNLDFQRNNKTVFKASSFAGYVGMLTGFKPGLFSLTLNERFSINGGYLGILEWILGKKDAMWIGFLTRTVLENSTSYEEAKNLLTKTKILAPAYFILGGNQSGEGCVITRDRKESLDVYELDAKQGRWYVVQTNYDRWKHPFFLDDRRTPAKMCLNRTSQENISFETMYDVLSTKPVLNKLTVYTTLIDVTKGQFETYLRDCPDPCIGW

SEQ ID NO: 15672 - protein, 293 aa, Homo sapiens
  misc_feature (1)...(293): Xaa = X or * as defined in Table 2
TARGSKARSGGTRWSLGPPSSSGGRRSWQPLVISRAVXHXGKSSRHQPLYSGHPHLGPVSHRGGPGPVRQPAATXRPACASKLVQPWHXWGPGXLGSQPALAGHLCRTGCEESHHTCFPGYVKPXRLXALPGGRPVXVGERARARPDEPREAAGFCGTEEQPHTDPAHPRLKRDCLPSVSQAAVSTTASAGFPPAWAASAGFPPTWTPNLSPATLGMQRSSCALTFRRICRFLSDNKWMQRSITSMAIWICNGSGGSTSGRVSFSSTLGGTDCSSSSLSKSETFPSATSFSLR

SEQ ID NO: 15673 - protein, 141 aa, Homo sapiens
  misc_feature (1)...(141): Xaa = X or * as defined in Table 2
GLSAPVAADPSLEPTPALHASIRPEADLQPXPRTPPLRSWGSPGVRSPRTGDPSGVTRLHRAIHQPITISSSTWVTCTGPLCSVLISPSQQESAPKRTVLEEHRLPRPPGAHADAHSGQLRAWPGQQREHGQEASQWEQHP

SEQ ID NO: 15674 - protein, 106 aa, Homo sapiens
GVKNNHPQIPALPRFKKSLPASVSQAAVSTTASAGFPPAWAASAGFPPAWAASAGFPPTWTPNLHRARHSLVCKTERSRPTQSSKPYWAPTMCWSTLRLEQKRPCH

SEQ ID NO: 15675 - protein, 127 aa, Homo sapiens
  DOMAIN (11)..(44): LacY family proton/sugar symporters proteins domain identified by eMATRIX, accession number BL00896A, p-value=1.114e- 11, raw score of 14.92
  misc_feature (1)...(127): Xaa = X or * as defined in Table 2
AVFFFFFFFFFFFFFFFFFFFFFFFFFFFFFFFFFFSSSSSSFFFFSFFLFFFFKLKELRLVIXPLNPENXESCPLFSPVNLDMPXTFKDKRWKVNWARSTSRQQLLESARTKSWAEREGGTRWRAW

SEQ ID NO: 15676 - protein, 65 aa, Homo sapiens
  DOMAIN (13)..(37): RHODOPSIN-LIKE GPCR SUPERFAMILY SIGNATURE domain identified by eMATRIX, accession number PR00237E, p-value=7.088e-09, raw score of 13.03
  misc_feature (1)...(65): Xaa = X or * as defined in Table 2
KNFLPNCSAKELFFFFFFFFFFFLLLLLLLLYFKFMIXWFYKHLAFPLLAFILSPTALXRGVFHH

SEQ ID NO: 15677 - protein, 68 aa, Homo sapiens
  DOMAIN (10)..(56): TRANSFERASE CHITIN SYNTHASE CHIT domain identified by eMATRIX, accession number PD01446H, p-value=6.170e-09, raw score of 20.90
VLVSFGVLLLLLFIFFTSFSFLFFFFLLFFFFFFFFFFFFFFFFFFFFFFFFFFFFFLLLLLLLLLCH

SEQ ID NO: 15678 - protein, 158 aa, Homo sapiens
  DOMAIN (108)..(132): RHODOPSIN-LIKE GPCR SUPERFAMILY SIGNATURE domain identified by eMATRIX, accession number PR00237E, p-value=6.029e-09, raw score of 13.03
SSLIFLLSSLISSMNRSISSPSPSIISMLSTSLLGTSSPKPGAGGAQTPLTFPPGSWYSPPPKAGASFCTGAFSTTLFSLGTFSMLSFFPVFFFFFFIFIFFFFFFFFFFFFFFFFFFLLLLLLLLYFKFGARGGLPRACATLPLALQGVTSMAVLMV

SEQ ID NO: 15679 - protein, 134 aa, Homo sapiens
KSLQYSNTGDMILVVSGSCHAKVIDRDGFEVMECIKGDQYIVDMANTKGHTAMLHTGSWHPKIKGEFMTCSNDATVTTWEVENSKKHKSVFKPRTMHGQKVIPTTCTYSRDGNLIAAACQNGSIQIWDRNLTVH

SEQ ID NO: 15680 - protein, 131 aa, Homo sapiens
LEKQMEKAHEDSEKLREIVLPMEKEIEELKAKLLRAEELIQEIQRRPRHAPSLHGSTELLPLSRDPSPPLEPLEELSGDGGPAAEAFAHNCDDSASISSFSLGGGVGSSSSLPQSRQGLSPEQEETASLVS

SEQ ID NO: 15681 - protein, 137 aa, Homo sapiens
NFMDVFTWSLPFVGEKVTDLFLNVLSICSDDELMTEGEDQFDGSAAARKEIIRNKIRAIGKMARVFSVLREESESVLTLKGLTPTGMLPSGVLAGGRQTLQSAIRGFSPPHRICSFEEAKGLDRINERMPPRKDAVQ

SEQ ID NO: 15682 - protein, 150 aa, Homo sapiens
RHERHERHEELMTEGEDQFDVGSAAARKEIIRNKIRAIGKMARVFSVLREESESVLTLKGLTPTGMLPSGVLAGGRQTLQSATVEAIEAEKAIRGFSPPHRICSFEEAKGLDRINERMPPRKDAVQQDGFNSLNTAHATENHGTGNHTAQ

SEQ ID NO: 15683 - protein, 55 aa, Homo sapiens
VWNRLIEYCKHACPKLEPFSLFIPLKVGSAAARKEIIRNKIRAIGKMARVFSVLR

SEQ ID NO: 15684 - protein, 331 aa, Homo sapiens
  misc_feature (1)...(331): Xaa = X or * as defined in Table 2
RMTQCLSECLICKFLSGKVTLGQAQWLTHVIPALWEAEAGRSPEVGRSRPSLAGMVKSRLVLKIQKKKKKKKISRAWWHMPVVPATWEAEAGELLEPGKAEVAARRDRATALPAWGSQADGKXGXGLSAPVAADPSLEPTPALHASRRPEADLQPXPRPPPLRSWGSQVCEVPGLGTPPGSPASQSHPSTPSPYLPLPGSPARVPCARCSSRPASKRARQSAPCGRAPTSPAARGSRRCTQRAAQSLARSAARTRTEASAVGTAPAAGRTGRGGPDKQEFVHGLVPLKQDNGRLQCTAQERAPRARTLRHTARPAAFGVLDLGGNHVLPCQ

SEQ ID NO: 15685 - protein, 66 aa, Homo sapiens
SHSSLPCSASSPPALVSPGSFSGLVYKNVTVPVYTALKGVRNCCTKRGCLIRKGPWPHHPMTGAGL

SEQ ID NO: 15686 - protein, 76 aa, Homo sapiens
  DOMAIN (3)..(61): Myosin head (motor domain) domain identified by PFam, accession name myosin_head, E-value=1.6e-10, PFam score of 38.0
EDKTISDQESFREVITAMDVMQFTKEEVWEVSRLLAGILHLGNIEFITAGGAQVSFKTGKIMPACPPRSLCSPWET

SEQ ID NO: 15687 - protein, 59 aa, Homo sapiens
GLSHQIILNRFYLKSSRLGAMAHACNPSTLGGRGQLIMRSGVRGQPVQHGKTPYLLKIQ

SEQ ID NO: 15688 - protein, 144 aa, Homo sapiens
  DOMAIN (28)..(77): F-box domain identified by PFam, accession name F-box, E- value=0.093, PFam score of 19.3
GRDSDRNSSEEGTAEKSKKLRTTNEHSQTCDWGNLLQDIILQVFKYLPLLDRAHASQVCRNWNQVFHMPDLWRCFEFELNQPATSYLKATHPELIKQIIKRHSNHLQYVSFKVDSSKESAEAACDILSQLVNCSLKTLGLISTA

SEQ ID NO: 15689 - protein, 138 aa, Homo sapiens
  DOMAIN (82)..(111): CALPAIN CYSTEINE PROTEASE (C2) FAMILY SIGNATURE domain identified by eMATRIX, accession number PR00704I, p-value=4.574e- 13, raw score of 9.52
  DOMAIN (3)..(117): Calpain large subunit, domain III domain identified by PFam, accession name Calpain_III, E-value=0.0031, PFam score of -46.3
RQAWHKAGLHAADWAGRARSLLGDSHTSWSAGSIPGKHYQAVGLHLWKVEKRRVNLPRVLSMPPVAGTVCHAYDREVHLRCELSPGYYLAVPSTFLKDAPGEVLLRVFSTGRVSLSAIRAVAKNTTPGAALPAVERGT

SEQ ID NO: 15690 - protein, 102 aa, Homo sapiens
  misc_feature (1)...(102): Xaa = X or * as defined in Table 2
HGSHGIALRPRQSQAQPLVHKVCCFQEEQMGAPEGKGPECGSRICRLLAQGLGFHLVCLDRVXHLAPHCSLSLHGCGPHDVPFLVAKRSFLGLEGPLSSSPP

SEQ ID NO: 15691 - protein, 50 aa, Homo sapiens
LFFPDNLEDETEDDDLFETEFRQYKRTYYMTKMGVDVVSEYVFANAFILK

SEQ ID NO: 15692 - protein, 91 aa, Homo sapiens
HLAGNMPPKQELGSGVGELAMCAPSEKFLNMGAPLGVGLGLVFVSSLGSMFLPPTTEAGATLYSLAMYGGLVLFSMFLLYDTQKVIKRAQV

SEQ ID NO: 15693 - protein, 220 aa, Homo sapiens
MALWTLRPTPLLVTCMLICAPGVMGAVVAPLTILGGPLLIRAAWYTAGIVGGLSTVAMCAPSEKFLNMGAPLGVGLGLVFVSSLVDQMGRWFVAGGAAVGLGALCYYGLGLSNEIGAIEKAVEYWFNSFVCHSNQQNACSHELHDERLLGDMGLPILHAMLLRRLPSVDSQNALSSIMLLHTALPLTKALTLQLKKCSSGLMLMEFTGLTMFPIILKQLD

SEQ ID NO: 15694 - protein, 409 aa, Homo sapiens
  misc_feature (1)...(409): Xaa = X or * as defined in Table 2
SCSAPEELCSLRPTLGARRGNCEAKVTGDRAFQICSVDLGAPPPMLAARLVCLRTLPSRVFHPAFTKASPVVKNSITKNQWLLTPSREYATXTXRLGIRAWGELGQELKEGSIGNHSMGKNILKFDSDGEEWLVAGGAVVGLGSICAYLLALGLGLNXDLGAIXKRLXFGPQYVKDRIHSTYMYLAGGVLGLTALSAIAIQQNRLFFMELPXWRRLLGWTIGVDLWQPWLGAGMLVRSIPYDQSPGPKHLAWLLHSGVMGAVVAPLTILGGPLLIRAAWYTAGIVGGLSTVAMCAPSEKFLNMGAPLGSGAGVSVFVSSIGIXCFFPPTDTVAGATLYSVAMYGGISSFLSMFLLYDTPESKSSRAEVSPMYGVQKYDPINSMLSIYMDTLNIFMRVATMLATGGNRKK

SEQ ID NO: 15695 - protein, 288 aa, Homo sapiens
  DOMAIN (18)..(57): PROTEIN ZINC FINGER ZINC-FINGER METAL-BINDING NU domain identified by eMATRIX, accession number PD01066, p-value=6.182e-36, raw score of 19.43
  DOMAIN (16)..(78): KRAB box domain identified by PFam, accession name KRAB, E- value=1.1e-37, PFam score of 138.7
QNILLGPKTLTSLGPLQFRDVAIEFSLEEWHCLDTAQRNLYRNVMLENYRNLGFLGIVVSKPDLITCLEQGRKPLTMKRNEMIAKPPVMSSHFAQDLCPEQSLKDSFQKVIVTRYEKREYGNLELKKGCESVDEGKVHKRGYNGLNQCLTATQSKVFQCDTYVKVSHIFSNSNRHKIRDTGKKPFKCIECGKAFNQSSTLATHKKIHTGEKPYRCEECGKAFNQSANLTTHKRIHTGEKPYKCEECGKAFNWSSDLNKHKKIHIERKPYIVKNVTDLLNVPPLLISIR

SEQ ID NO: 15696 - protein, 36 aa, Homo sapiens
GVSGALTVLMKDALKPNLMQTLEVSRVTPAFLNWFW

SEQ ID NO: 15697 - protein, 97 aa, Homo sapiens
  DOMAIN (13)..(50): Formate--tetrahydrofolate ligase proteins domain identified by eMATRIX, accession number BL00721C, p-value=3.400e-37, raw score of 16.92
EKGHTRTAQFDISVASEIMAVLALTTSLEDMRERLGKMVVASSKKGEPVSAEDLGVSGALTVLMKDAIKPNLMQTLEVSRVTPAFLNWFWTVRAEWL

SEQ ID NO: 15698 - protein, 122 aa, Homo sapiens
PTRPRLGNLRPRLGNPPILRHQGVRESAVCAEAMAAAAPVAADDNKRRRRPGADSISSYEAQITALKQERQQQQQDCEEKERELGRLKQLLSRAYPLDSLEKQMEKVGIGMASLLPWDLEEC

SEQ ID NO: 15699 - protein, 36 aa, Homo sapiens
KYSIFSDFLADQAACYVQAIQWILHYYYHGVQSWSW

SEQ ID NO: 15700 - protein, 37 aa, Homo sapiens
GSVPNKFYVHNDMFRYEDEVFGDSEPELDEGEVTLKI

SEQ ID NO: 15701 - protein, 26 aa, Homo sapiens
LAARRQEQRATVRALGFWAFSLQAKE

SEQ ID NO: 15702 - protein, 97 aa, Homo sapiens
  DOMAIN (28)..(53): Ubiquitin carboxyl-terminal hydrolases family 2 proteins domain identified by eMATRIX, accession number BL00972D, p-value= 2.412e-10, raw score of 22.55
  DOMAIN (25)..(57): Ubiquitin carboxyl-terminal hydrolase family domain identified by PFam, accession name UCH-2, E-value=0.0027, PFam score of 8.0
KLDTVVEFPIRGLNMSEFVCNMSARPYVYDLIAVSNHYGAMGVGHYKAAYVLFYQRRDDEFYKTPSLSSSGSSDGGTRPSSSQQGFGDDEACSMDTN

SEQ ID NO: 15703 - protein, 61 aa, Homo sapiens
MVFPPLVFQTKAAYVLFYQRRDDEFYKTPSLSRSGSSDGGTRPSSSQQGFGDDEACSMDTN

SEQ ID NO: 15704 - protein, 206 aa, Homo sapiens
  DOMAIN (107)..(132): Ubiquitin carboxyl-terminal hydrolases family 2 proteins domain identified by eMATRIX, accession number BL00972D, p-value= 8.962e-18, raw score of 22.55
  DOMAIN (104)..(165): Ubiquitin carboxyl-terminal hydrolase family domain identified by PFam, accession name UCH-2, E-value=2.8e-27, PFam score of 104.0
AYEKHVSMLQPQKKKKTTVALRDCIELFTTMETLGEHDPWYCPNCKKHQQATKKFDLWSLPKILVVHLKRFSYNRYWRDKLDTVVEFPIRGLNMSEFVCNLSARPYVYDLIAVSNHYGAMGVGHYTAYAKNKLNGKWYYFDDSNVSLASEDQIVTKAAYVLFYQRRDDEFYKTPSLSSSGSSDGGTRPSSSQQGFGDDEACSMDTN

SEQ ID NO: 15705 - protein, 268 aa, Homo sapiens
  DOMAIN (110)..(259): PH domain identified by PFam, accession name PH, E-value=3.1e -05, PFam score of 23.8
MGPQRGPYPQAWNHQPKGECPPLDAAAGPAWSCAPAGAQKQLPRLLHPHAPSREGLSTVGSICSPQVDIGLNNGDMSDSVGSLKYICPSSPKEKSLFSFLYTEICLQGLVGKEGSQQMVEGLISWRRLYCVLRGGKLYCFYSPEEIEAKVEPALVVPINKMLEREREGERAERNPSQENKEWRRPGQFALEMEGPSLRGPALRLAGLPTQQETRIRAMDKDAKKRIHNFSVINPVPGQAITQIFAVDNREDLQKWMEAFWQHFFDLSK

SEQ ID NO: 15706 - protein, 122 aa, Homo sapiens
  DOMAIN (25)..(64): PROTEIN ZINC FINGER ZINC-FINGER METAL-BINDING NU domain identified by eMATRIX, accession number PD01066, p-value=8.333e-39, raw score of 19.43
  DOMAIN (23)..(85): KRAB box domain identified by PFam, accession name KRAB, E- value=1.3e-40, PFam score of 148.3
PAGIRRVTARTPGPPGSLEMGPLQFRDVAIEFSLEEWHCLDAAQRNLYRDVMLENYRNLIFLGIVVSKPNLITCLEQGKKPLTMKRHEMIAKPPVMYSHFPQDLSSEQSIKDSFQKVILRKI

SEQ ID NO: 15707 - protein, 78 aa, Homo sapiens
TAISHSLSEWSYLCILALVIGALFSSFGEVMFSSMVLMLVDVYLCLVIKELGFYYSLCSLGLFVPILLGKTLQAFKGN

SEQ ID NO: 15708 - protein, 742 aa, Homo sapiens; identical to SEQ ID NO: 11099
  DOMAIN (48)..(101): Link domain proteins domain identified by eMATRIX, accession number BL01241, p-value=1.000e-40, raw score of 35.81
  DOMAIN (31)..(119): Extracellular link domain identified by PFam, accession name Xlink, E-value=1.3e-66, PFam score of 155.1

SEQ ID NO: 15709 - protein, 75 aa, Homo sapiens
HFDNCSNCMVTAASAHTSHPMQGRTTPSPEDSSWTDFFNPISHPMGRGHQAGRRMDMDSSHSTTLQPTASPNTGF

SEQ ID NO: 15710 - protein, 141 aa, Homo sapiens
AIPNHKDPESTQFSHHWYLTDWKSGDTYQSLSSSSTATGTTVIECTQVQGSSESLASPSTSRATTPSQLSIEVEAREISSPGRPPGLMSPSSGYSSQSETPTPTVSMSLTLGHLPPPSSSVRVRPVVPERKSSLPPTSPME

SEQ ID NO: 15711 - protein, 42 aa, Homo sapiens
DKEIFSKSFLSHFILLHISGSLPKVHPRYDLDGDASMAKGSI

SEQ ID NO: 15712 - protein, 81 aa, Homo sapiens
  DOMAIN (16)..(59): kw TRANSCRIPTASE REVERSE II ORF2 domain identified by eMATRIX, accession number DM01354T, p-value=9.000e-20, raw score of 9.48
PPVPNSSRRPTRPPTRPRTSYEKQGYLLLPPVFSIVLEVLARAISQETEIKSVQMGKEEVKLSLVCVCVYLCMRKSCGIHQ

SEQ ID NO: 15713 - protein, 194 aa, Homo sapiens
QERLPSGIRPLSGNIRVATAMPPGTARPGSRGCPIGTGGVLSSQIKVAHRPVTQQGLTGMKTGTKGPQRQILDKSYYLGLLRSKISELTTEVNKLQKGIEMYNQENSVYLSYEKRAETLAVEIKELQGQLADYNMLVDKLNTNTEMEEVMNDYNMLKAQNDRETQSLDVIFTERQAKEKQIRSVEEEIEQEKQA

SEQ ID NO: 15714 - protein, 147 aa, Homo sapiens
AYVKLSKVLNFYVANADDSSKTELLFAALKALKYLFRFIIQSRVLYLRFYGQSKDGDEFNNSIRQLFLAFNMLMDRPLEEAVKIKGAALKYLPSIINDVKLVFDPVELSVLFCKFIQSIPDNQLVRQKLNCMTKIVESTLFRQSECK

SEQ ID NO: 15715 - protein, 189 aa, Homo sapiens
WWWGHQRQGVGHGDEDAGPDTTPAIIITTMDKFNVTKPVEYLINPIITQFFPTLLLWCFSALLPTIVYYSGFFEDHWTRSGENRTTMHKCYTLLIFMVLLLPSLGLSSLDLFFRWLFDKKFLAEAAIRLESGFLPNNGAFLKNYVIASPFIGNAMDLLRIPGLLMYMIRLCLTRSAAERRNVKRHQAYE

SEQ ID NO: 15716 - protein, 104 aa, Homo sapiens
  misc_feature (1)...(104): Xaa = X or * as defined in Table 2
AKPSSGFECSRSAFLSKECGKQLGPSSSSALSLSGSFFHLGAPSXPRTPRKSDGARCRPHPPSSMIGVQLLLGGCLAQHPHHRAQLLDADVPTTISIKHVKGQP

SEQ ID NO: 15717 - protein, 148 aa, Homo sapiens
  DOMAIN (97)..(119): Enoyl-CoA hydratase/isomerase proteins domain identified by eMATRIX, accession number BL00166B, p-value=7.577e-09, raw score of 16.92
  misc_feature (1)...(148): Xaa = X or * as defined in Table 2
LHCCPLQLKMVACRAIGILSRFFAFRFLRSRGYICRNFTGSSALLTRTHINYGVKGDVAGARINSTNSKVNTLITELQSQFSQVMNEILSSYQIRRAVLISSKPGCFIASSDINILTACMTLXEVSHRSSEAQIIVQKLEMTTLSIVA

SEQ ID NO: 15718 - protein, 215 aa, Homo sapiens
FVKMAAPAGGGGSAVSVLAPNGRRHTVKVTPSTVLLQVLEDTCRRQDFNPCEYDLKFQRSVLDLSLQWRFANLPNNAKLEMVPASRSREGPENMVRIALQLDDGSRLQDSFCSGQTLWELLSHFPQIRECLQHPGGATPVCVYTRDEVTGEAALRGTTLQSLGLTGGSATSQVCHEVLRPRGRRPQEAWARQRRLARQPPALHFPWNLGSSAAAT

SEQ ID NO: 15719 - protein, 69 aa, Homo sapiens
NHVNFCCFCCFSDRGEIKLGINVIKRIHVIRKIFFPFRTEASLASRREQKREQYRQVKAHVQKEDRRVQ

SEQ ID NO: 15720 - protein, 23 aa, Homo sapiens
CFPAAPDEDSTTNITKKQKWTVE

SEQ ID NO: 15721 - protein, 128 aa, Homo sapiens
  DOMAIN (95)..(107): Purine and other phosphorylases family 1 proteins domain identified by eMATRIX, accession number BL01232A, p-value=4.094e- 11, raw score of 11.41
GDSRSRVTRRQDTAWNAWSASHCRRLSASSRSPLTGPASVGGMAATGANAEKAESHNDCPVRLLNPNIAKMKEDILYHFNLTTSRHNFPALFGDVKFVCVGGSPSRMKAFIRSGARHCGHNRAGSGYL

SEQ ID NO: 15722 - protein, 49 aa, Homo sapiens
FVDLLISNIAKMKEDILYHFNLTTSRHNFPALFGDVKVRGQVLTPWNLA

SEQ ID NO: 15723 - protein, 209 aa, Homo sapiens
  DOMAIN (143)..(166): Purine and other phosphorylases family 1 proteins domain identified by eMATRIX, accession number BL01232B, p-value=2.800e- 20, raw score of 14.61
GDSRSRVTRRQDTAWNAWSASHCRRLSASSRSPLTGPASVGGMAATGANAEKAESHNDCPVRLLNPNIAKMKEDILYHFNLTTSRHNFPQALFGDVKFVCVGGSPSRNEKPSSGCRLGAELGLDCPGRDYPNICAGTDRYAMYKVGPVLSVSHGMGIPSISIMLHELIKLLYYARCSNVTIIRIGTSGGIGLEPGTVVITEQAVDTCFK

SEQ ID NO: 15724 - protein, 238 aa, Homo sapiens; identical to SEQ ID NO: 14028
  DOMAIN (170)..(188): Immunoglobulins and major histocompatibility complex proteins domain identified by eMATRIX, accession number BL00290B, p-value= 9.308e-15, raw score of 13.17
  DOMAIN (17)..(118): Class II histocompatibility antigen, alp domain identified by PFam, accession name MHC_II_alpha, E-value=3.6e-67, PFam score of 236.6

SEQ ID NO: 15725 - protein, 52 aa, Homo sapiens
ITFLFIKNPTFDSECYFFPHSLPCTLPYFPPEFDAPSPLPETTENVVCALGL

SEQ ID NO: 15726 - protein, 283 aa, Homo sapiens
  DOMAIN (207)..(225): Immunoglobulins and major histocompatibility complex proteins domain identified by eMATRIX, accession number BL00290B, p-value= 9.308e-15, raw score of 13.17
  DOMAIN (29)..(130): Class II histocompatibility antigen, alp domain identified by PFam, accession name MHC_II_alpha, E-value=3.6e-67, PFam score of 236.6
FLSVLPHSRALLTPKRAPKKKMAISGVPVLGFFIIAVLMSAQESWAIKEEHVIIQAEFYLNPDQSGEFMFDFDGDEIFHVDMAKKETVWRLEEFGRFASFEAQGALANIAVDKANLEIMTKRSNYTPITNVPPEVTVLTNSPVELREPNVLICFIDKFTPPVVNVTWLRNGKPVTTGVSETVFLPREDHFFRKFHYLPFLPSTEDVYDCRVEHWGLDEPLLKHWEFDAPSPLPETTENVVCALGLAVGLVGIIIGTIFHHSRELRKSNCRQKRKGGLCKAQWR

SEQ ID NO: 15727 - protein, 74 aa, Homo sapiens
INNSLFIKKGPTALQPQHRTRPWTATASPARGRFATSMPSSRLAATVAGCGIPDSGRPAPTRDSQNMASPPDWH

SEQ ID NO: 15728 - protein, 103 aa, Homo sapiens
AGMLPAVGSVDEEEDPAEEDCPELVPIETTQSEEEEKSGLGAKIPVTIITGYLGAGKTTLLNYILTEQHSKRVAVILNEFGEGSALEKSLSVSQGGELYEEWP

SEQ ID NO: 15729 - protein, 1084 aa, Homo sapiens
  DOMAIN (268)..(322): Kinesin light chain repeat proteins domain identified by eMATRIX, accession number BL01160B, p-value=4.051e-09, raw score of 19.54
  misc_feature (1)...(1084): Xaa = X or * as defined in Table 2
MELSVTLVSRAPRPGLPVFRQLNTAIAVSQMSSGQCRLAPLIQVIQDCSHLYHYTVKLLFKLHSCLPADTLQGHRDRFHEQFHSLRNFFRRASDMLYFKRLIQIPRLPEGPPNFLRASALAEHIKPVVVIPEEAPEDEEPENLIEISTGPPAGEPVVVADLFDQTFGPPNGSVKDDRDLQIESLKREVEMLRSELEKIKLEAQRYIAQLKSQVNALEGELEEQRKQKQKALVDNEQLRHELAQLRAAQLEGERSQGLREEAERKASATEARYNKLKEKHSELVHVHAELLRKNADTAKQLTVTQQSQEEVARVKEQLAFQVEQVKRESELKLEEKSDQLEKLKRELEAKAGELARAQEALSHTEQSKSELSSRLDTLSAEKDALSGAVRQREADLLAAQSLDDFSPTSKLQRLLAESRQMVTDLELSTLLPISHENLTGSATNIRKCCLQSCSHGLIAKPSATLIQHVLLLFIAEGTLRVEGSYSFTATAPDTALDSDGEPGQGPLCNFNAKLTSGCDRGRLWHPRQRPVRRFSEQQRSHRCGPATALFQAARAHPPSPGLQWPAISISKAINTQEAPVKEKHARRILGRLLDPGVGHHSGHTPREVGFTFWSTPLGCRCPAVHSQLEFCHVLKGPRECTHGCLMPQQHVCCFRNSPAAMVQPQRLLHSRTRTVGTGLLSPANLPNPQRIPKRMPPAPPGDPAPPGIGNGACPLQSMAGPSGYIQDTGSAISSIQQTSTPQCSRENQAKALCPPGTSLTPEVLQCIQIAGPPGLSGLTVCVLKMQTSSPDSSAAGLGEPRNLRPATGSLTTEVPGLWSCHISQLESQEQELRQRLLDEQFSVFRGAAAEAAVILQDAVSKLDDPLHLRCTSSPDYLVSSAQEALDAVSTLEEGHAQYLTSLADASALVAALTRFSHLAADTIINGGATSHLAPTDPADRLIDTCRECGARALELMGQLQDQQALRHMQASLVRTPLQGILQLGQAAVDGGGRRLPLSDSHPHQELKPKSLDVRQEELGAVVDKEMAATSAAIEDAVRRIEDPQLLHRHXXRXGAVTRGGLHLEGHQSLLSWSRQAIRLLVTTST

SEQ ID NO: 15730 - protein, 1083 aa, Homo sapiens
  DOMAIN (458)..(512): Kinesin light chain repeat proteins domain identified by eMATRIX, accession number BL01160B, p-value=4.051e-09, raw score of 19.54
  DOMAIN (834)..(1027): I/LWEQ domain identified by PFam, accession name I_LWEQ, E- value=4.5e-128, PFam score of 432.5
ESRGRSRTKAGGGGRMNSIKNVPARVLSRRPGHSLEAEREQFDKTQAISISKAINTQEAPVKEKHARRIILGTHHEKGAFTFWSYAIGLPLPSSSILSWKFCHVLHKVLRDGHPNVLHDCQRYRSNIREIGDLWGHLHDRYGQLVNVYTKLLLTKISFHLKHPQFPAGLEVTDEVLEKAAGTDVNNIFQLTVEMFDYMDCELKLSESVFRQLNTAIAVSQMSSGQCRLAPLIQVIQDCSHLYHYTVKLLFKLHSCLPADTLQGHRDRFHEQFHSLRNFFRRASDMLYFKRLIQIPRLPEGPPNFLRASALAEHIKPVVVIPEEAPEDEEPENLIEISTGPPAGEPVVVADLFDQTFGPPNGSVKDDRDLQIESLKREVEMLRSELEKIKLEAQRYIAQLKSQVNALEGELEEQRKQKQKALVDNEQLRHELAQLRAAQLEGERSQGLREEAERKASATEARYNKLKEKHSELVHVHAELLRKNADTAKQLTVTQQSQEEVARVKEQLAFQVEQVKRESELKLEEKSDQLEKLKRELEAKAGELARAQEALSHTEQSKSELSSRLDTLSAEKDALSGAVRQREADLLAAQSLVRETEAALSREQQRSSQEQGELQGRLAERESQEQGLRQRLLDEQFAVLRGAAAEAAGILQDAVSKLDDPLHLRCTSSPDYLVSRAQEALDAVSTLEEGHAQYLTSLADASALVAALTRFSHLAADTIINGGATSHLAPTDPADRLIDTCRECGARALELMGQLQDQQALRHMQASLVRTPLQGILQLGQELKPKSLDVRQEELGAVVDKEMAATSAAIEDAVRRIEDMMNQARHASSGVKLEVNERILNSCTDLMKAIRLLVTTSTSLQKEIVESGRGAATQQEFYAKNSRWTEGLISASKAVGWGATQLVEAADKVVLHTGKYEELIVCSHEIAASTAQLVAASKVKANKHSPHLSRLQECSRTVNERAANVVASTKSGQEQIEDRDTMDFSGLSLIKLKKQEMETQVRVLELEKTLEAERMRLGELRKQHYVLAGASGSPGEEVAIRPSTAPRSVTTKKPPLAQKPSVAPRQDHQLDKKDGIYPAQLVNY

SEQ ID NO: 15731 - protein, 224 aa, Homo sapiens
  DOMAIN (12)..(67): Cathelicidins proteins domain identified by eMATRIX, accession number BL00946A, p-value=8.927e-09, raw score of 15.02
SKSELSSRLDTLSAEKDALSGAVRQREADLLAAQSLDDFSPTSKLQRLLAESRQMVTDLELSTLLPISHENLTGSATNIRKCCLQSCSHGLIAKPSATLIQHVLLLFIAEGTLRVEGSYSFTATAPDTALDSDGEARPGAAFATSMPSSRLAATVAGCGIPRQRPVAGGYGGGWHRCTRDSQNMGKPRLTGHGQLNRPVTASFPLRKQLTVGVSSPQEQGMYGH

SEQ ID NO: 15732 - protein, 72 aa, Homo sapiens
  DOMAIN (17)..(58): Cytosol aminopeptidase proteins domain identified by eMATRIX, accession number BL00631C, p-value=7.176e-28, raw score of 17.48
ETPGGFKDNLHAVICLAENSVGPNATRPDDIHLLFSGKTVEINNTDAEGTLVLADGVPYACKDLGADIILDM

SEQ ID NO: 15733 - protein, 74 aa, Homo sapiens
  DOMAIN (17)..(58): Cytosol aminopeptidase proteins domain identified by eMATRIX, accession number BL00631C, p-value=8.059e-28, raw score of 17.48
ETPGGFKDNLHAVICLAENSVGPNATRPDDIHLLHSGKTVEINNTDAEGTLVLADGVSYACKDLGADIILDMAT

SEQ ID NO: 15734 - protein, 157 aa, Homo sapiens
  DOMAIN (53)..(89): Enoyl-CoA hydratase/isomerase proteins domain identified by eMATRIX, accession number BL00166D, p-value=1.000e-15, raw score of 22.87
LIPSDRPLIASTHACADSNDLKVIIISAVGPVFSSVHDLKELTEEQGRDYHAEVFQTCSKVALEMLFTGEPISAQEALLHGLLSKVVPEAELQEETMRIARKIASLSRPVVSLGKATFYKQLPQDLGTAYYLTSQAMVDNLALRDGQEGITGFLQKR

SEQ ID NO: 15735 - protein, 239 aa, Homo sapiens
  DOMAIN (126)..(162): Enoyl-CoA hydratase/isomerase proteins domain identified by eMATRIX, accession number BL00166D, p-value=8.800e-16, raw score of 22.87
  DOMAIN (10)..(161): Enoyl-CoA hydratase/isomerase family domain identified by PFam, accession name ECH, E-value=1.2e-19, PFam score of 78.8
MWWNSLDGIRNIVLSNPKKRNTLSLAMLKSLQSDILHDADSNDLKVIIISAEGPVFSSGHDLKELTEEQGRDYHAEVFQTCSKVMMHIRNHPVPVIAMVNGLATAAGCQLVASCDICRGERQDLFCHSWVPRKVALEMLLTGEPISAQEALLHGLLNKGGPEAELQEETMRIARKIASLSRPGVSLGKATFYKQLPQDLGTDYYLTSQAMVDNLALRDRQEGITAFLHKRKPVWSHEPV

SEQ ID NO: 15736 - protein, 30 aa, Homo sapiens
YYKCGAQFALVTLGTLGTYTAFTVAVTRWR

SEQ ID NO: 15737 - protein, 71 aa, Homo sapiens
TNFLSKTMYFKRAARAFPVLLTGAGKTTLLNYILTEQHSKRVAVILNEFGEGSALEKSLAVSQGGELYEEW

SEQ ID NO: 15738 - protein, 107 aa, Homo sapiens
  DOMAIN (25)..(45): PHOSPHOMANNOSE ISOMERASE TYPE I SIGNATURE domain identified by eMATRIX, accession number PR00714F, p-value=7.632e-20, raw score of 10.57
IFGELLLFLHHQYPGDIGCFAIYFLNLLTLKPGEAMFLEANVPHAYLKGGEPHFSSEPHCHPCWALFPYLDKGRRRVVKETPKDLAALTSEGSWAQQATAGRDDECI

SEQ ID NO: 15739 - protein, 102 aa, Homo sapiens
PPAPDTDPTPTYPGLTLLLTNPRTNSTLPPTLHLPSRPTPSSPPSTSLPPSLVLGFFLKIQSGKRRAYPEHFWVQNGERKAQPSVHAPVNSASAYVDAAANS

SEQ ID NO: 15740 - protein, 136 aa, Homo sapiens
  DOMAIN (66)..(136): PDZ domain (Also known as DHR or GLGF) domain identified by PFam, accession name PDZ, E-value=3e-05, PFam score of 30.9
SARLHTVYRVPRLNHPPEEIGCHSRVPGSAHPSEKPPSAPASAPQNVFSTTVSSGYNTKKIGPRLNIQLKKGTEGLGFSITSRDVTIGGSAPIYVKNILPRGAAIQDGRLKAGDRLIEGNGVDLVGKSQEEVVSLL

SEQ ID NO: 15741 - protein, 134 aa, Homo sapiens
  DOMAIN (49)..(114): RNA recognition motif. domain identified by PFam, accession name rrm, E-value=9e-07, PFam score of 35.9
SLPRGGFRCCLCHVTTANRPSLDAHLGGRKHRHLVELRAARKAQGLRSVFVSGFPRDGDSAQLSEYFLAFGPVASVVMDKDKGVFAIVEMGDVGAREAVLSQSQHSLGGHSLRVPPPEQKESRAPPPNPQRSGP

SEQ ID NO: 15742 - protein, 141 aa, Homo sapiens
GRVGKLRKMMIIAENKKDMSGHYQNALYLGDGSNRGRILKNCGQKSLAYFTSATHGLYEDTESLKETFDPKKETIPHIYPNARLLQPPAPILPLDTNWTLLTVSNGFFEGTIARKGKGGVLAACIDIVTGWSIGWRRGVKL

SEQ ID NO: 15743 - protein, 101 aa, Homo sapiens
KSQESECPDSVQRDVLSGGRHTHVKRKKVTFLEEVTEYYISGDEDRKGPWEEFARDGCSVQKRIQETEDAIGYCLTFEHRERIGNRLQGTCCKGLNVLKQC

SEQ ID NO: 15744 - protein, 80 aa, Homo sapiens
  DOMAIN (46)..(72): Integrins beta chain cysteine-rich domain proteins domain identified by eMATRIX, accession number BL00243H, p-value=5.650e- 14, raw score of 17.53
PPDCSRAACPVLCSGNGQYSKGRCLCFSGWKGTECDVPTTQCIDPQCGGRGICIMGSCACNSGYKGESCEEAPRYIPKKE

SEQ ID NO: 15745 - protein, 81 aa, Homo sapiens
  DOMAIN (47)..(73): Integrins beta chain cysteine-rich domain proteins domain identified by eMATRIX, accession number BL00243H, p-value=5.650e- 14, raw score of 17.53
AVPDCSRAACPVLCSGNGQYSKGRCLCFSGWKGTECDVPTTQCIDPQCGGRGICIMGSCACNSGYKGESCEEAPRYIPKKE

SEQ ID NO: 15746 - protein, 35 aa, Homo sapiens
  DOMAIN (23)..(34): Neutral zinc metallopeptidases zinc-binding region proteins. domain identified by eMATRIX, accession number BL00142, p-value= 7.188e-10, raw score of 8.38
IIHLYFCVFFEDHSDNPLGAAVTLAHELGHIFGWI

SEQ ID NO: 15747 - protein, 30 aa, Homo sapiens
PSGESWPSMGHRLIPGIRCGPNNREESGDR

SEQ ID NO: 15748 - protein, 116 aa, Homo sapiens
  misc_feature (1)...(116): Xaa = X or * as defined in Table 2
IWFPLRRRKARQEEKSGLGAPRSPSHNYPPGYLGCLGKTNTSXTYILDQSNIGKRVAAILNXILGGRKLRLEKSLSCQPKVEELYERVAWIPXKPGCLLLVSVKVRNVFDWCTWVY

SEQ ID NO: 15749 - protein, 136 aa, Homo sapiens
  DOMAIN (84)..(99): G-PROTEIN BETA WD-40 REPEAT SIGNATURE domain identified by eMATRIX, accession number PR00320A, p-value=7.000e-13, raw score of 16.74
  DOMAIN (59)..(134): WD domain, G-beta repeat domain identified by PFam, accession name WD40, E-value=2.4e-11, PFam score of 51.1
  misc_feature (1)...(136): Xaa = X or * as defined in Table 2
RPPPPVSSVPGPGRDQLGVTPLSGRHSLLCCWVRIVFPESDGAPXMASFPPRVNEKEIGKLLLNLVDHTEVVRDLTFAPDGSLILVSASRDKTLRVWDLKDDGNMMKVLRGHQKLVYSCAFSPDSSMLCSVGASKA

SEQ ID NO: 15750 - protein, 77 aa, Homo sapiens
SLRFVLSVFCQSLLLGKAESSKYDTRETPKAWKESAAPELLGWAHSSGLTCDIKCCRARDLPWSGPKIHTSVMCPSS

SEQ ID NO: 15751 - protein, 33 aa, Homo sapiens
  DOMAIN (5)..(28): PREPROTEIN TRANSLOCASE SECY SUBUNIT SIGNATURE domain identified by eMATRIX, accession number PR00303G, p-value=5.655e- 09, raw score of 10.45
FFFFFFFFFFFFFFFFFFFFFYKSLIKKLNKNI

SEQ ID NO: 15752 - protein, 78 aa, Homo sapiens
LGLLALATTPQLIFVFFVKMGPDWSRIPELKQSTHLGLPKCWNHRHKPLCNTFQSYFYPWTYNCHPSCKKIKVKWRQV

SEQ ID NO: 15753 - protein, 90 aa, Homo sapiens
  DOMAIN (1)..(82): CUB domain identified by PFam, accession name CUB, E-value= 3.1e-12, PFam score of 54.1
SDCTWTINLPIGFGVHLQFVNFSTETIHDYLEVRSGSSETSTVIGRLSGPQIPSSLFSTTHETSLYFHSDYSQNKQGFHIVYQGKRNNKK

SEQ ID NO: 15754 - protein, 188 aa, Homo sapiens
  DOMAIN (117)..(148): Receptor tyrosine kinase class V proteins domain identified by eMATRIX, accession number BL00790I, p-value=4.840e-11, raw score of 20.01
MSLGCFSETWTPPNGSVGMYTSAIQMSVFSFAALGGQTEVQFGNMPRRGTVSSNERSHYSRYGGGITVLREEKGRNRHIDTCHCVRIAYSVQYSNMLCRERVENTSHPGEMQVTIQNLMPATVYIFRVMAQNKHGSGESSAPLRVETQPEAISDVFHYLQILVLPNTTTLLSSSADELISYFRGYSSR

SEQ ID NO: 15755 - protein, 121 aa, Homo sapiens
  DOMAIN (34)..(47): PROTEIN ZINC-FINGER METAL-BINDI domain identified by eMATRIX, accession number PD00066, p-value=3.143e-12, raw score of 13.92
  DOMAIN (16)..(121): Zinc finger, C2H2 type domain identified by PFam, accession name zf-C2H2, E-value=2.4e-19, PFam score of 77.7
KSQLMCQQMYMGEKPFGCRCCEKAFSNKSYLLVHQQTHAEEKPYGCNECGKDFSSKSYLIVHQRIHTGEKLHECSECRKTFSFHSQLGIHQRIHTGENPYECCECGKVFSKKDQLVSHQKT

SEQ ID NO: 15756 - protein, 33 aa, Homo sapiens
GTLCCDSSQTQTEWMTSIFIAQVRDLFELSSRV

SEQ ID NO: 15757 - protein, 248 aa, Homo sapiens
VNGVPSRSPRLVASGDDSVDSLLQRMVQNEDQEPMEKSIDAVIATASAPPSSSPGRSHSKDRTLGKPDSLLVPAVASDSCNNSISLLSEKLTSSCSPHHIKRSVVEAMQRQARKMCNYDKILATKKNLDHVNKILKAKKLQRQARTGNNFVKRRPGRPRKCPLQAVVSMQAFQAAQFVNPELNRDEEGAALHLSPDTVTDVIEAVVQSVNLNPEHKKGLKRKGWLLEEQTRKKQKPLPEEEEQENNKR

SEQ ID NO: 15758 - protein, 87 aa, Homo sapiens
VGWQQGVPEPPPGKAVTVPLRPADPFKGKKAPARSGFPALFPGDPPGEESLGRRRPGSSPLTPLSIPEVIKIFVPPAPQKSGHFFSF

SEQ ID NO: 15759 - protein, 108 aa, Homo sapiens
MIGGTPQMFFISGAKGQWSPSLQPPPRAHRSSPWAPSSKSTSGGTAALGSLGSKDYFPRTGDGVVELRRSDQRRAHLPGCPTVLRTLLPQQRGDRDLQQLRHHELRSL

SEQ ID NO: 15760 - protein, 52 aa, Homo sapiens
LFLPFSRVLLERLIVNRPHPWGLLITFIELIKNPAFKFWNHEFVHCAPGRVG

SEQ ID NO: 15761 - protein, 1109 aa, Homo sapiens
LNLKFEIEVLCKNLALDINELKPGNLLKDKDRLKNLDEQLSAPKKDVKQPEELPPITTTTTSTTPATNTTCTATVPPQPQYSYHDINVYSLAGLAPHITLNPTIPLFQAHPQLKQCVRQAIERAVQELVHPVVDRSIKIAMTTCEQIVRKDFALDSEESRMRIAAHHMMRNLTAGMAMITCREPLLMSISTNLKNSFASALRTASPQQREMMDQAAAQLAQDNCELACCFIQKTAVEKAGPEMDKRLATEFELRKHARQEGRRYCDPVVLTYQAERMPEQIRLKVGGVDPKQLAVYEEFARNVPGFLPTNDLSQPTGFLAQPMKQAWATDDVAQIYDKCITELEQHLHAIPPTLAMNPQAQALRSLLEVVVLSRNSRDAIAALGLLQKAVEGLLDATSGADADLLLRYRECHLLVLKALQDGRAYGSPWCNKQITRCLIECRDEYKYNVEAVELLIRNHLVNMQQYDLHLAQSMENGLNYMAVAFAMQLVKILLVDERSVAHVTEADLFHTIETLMRINAHSRGNAPEGLPQLMEVVRSNYEAMIDRAHGGPNFMMHSGISQASEYDDPPGLREKAEYLLREWVNLYHSAAAGRDSTKAFSAFVGQMHQQGILKTDDLITRFFRLCTEMCVEISYRAQAEQQHNPAANPTMIRAKCYHNLDAFVRLIALLVKHSGEATNTVTKINLLNKVLGIVVGVLLQDHDVRQSEFQQLPYHRIFIMLLLELNAPEHVLETINFQTLTAFCNTFHILRPTKAPGFVYAWLELISHRIFIARMLAHTPQQKGWPMYAQLLIDLFKYLAPFLRNVELTKPMQILYKGTLRVLLVLLHDFPEFLCDYHYGFCDVIPPNCIQLRNLILSAFPRNMRLPDPFTPNLKVDMLSEINIAPRILTNFTGVMPPQFKKDLDSYLKTRSPVTFLSDLRSNLQVSNEPGNRYNLQLINALVLYVGTQAIAHIHNKGSTPSMSTITHSAHMDIFQNLAVDLDTEGRYLFLNAIANQLRYPNSHTHYFSCTMLYPFCRGPFRKPSQEQITRVLLERLIVNRPHPWGLLITFIELIKNPAFKFWNHGICYTCAPGNSEKLFPVGSAQWLAWGQEGQGPSKLIGRGTGLPS

SEQ ID NO: 15762 - protein, 173 aa, Homo sapiens
  DOMAIN (1)..(166): Elongation factor Tu family domain identified by PFam, accession name GTP_EFTU, E-value=3.5e-29, PFam score of 101.0
KMDSTEPPYSQKRYEEIVKEVSTYIKKIGYNPDTVAFVPISGWNGDNMLEPSANMPWFKGWKVTRKDGNASGTTLLEALDCILPPTRPTDKPLRLPLQDVYKIGGIGTVPVGRVETGVLKPGMVVMHHEALSEALPGDNVGFNVKNVDVKDVRRGNGAGDSTNEPTMEANGFT

SEQ ID NO: 15763 - protein, 147 aa, Homo sapiens
  DOMAIN (9)..(19): GTP-BINDING ELONGATION FACTOR SIGNATURE domain identified by eMATRIX, accession number PR00315E, p-value=3.864e-09, raw score of 12.29
  DOMAIN (1)..(126): Elongation factor Tu family domain identified by PFam, accession name GTP_EFTU, E-value=6.1e-20, PFam score of 69.9
AYTLGVKQLIVGVNKMDSTEPPYSQKRYEEIVKEVSTYIKKIGYNPDTVAFVPISGWNGDNMLEPSANMPWFKGWKVTRKDGNASGTTLLEALDCILPPTRPTDKPLRLPLQDVYKIGGIGTVPVGFAPVNVTTEVKSVEMHHEALS

SEQ ID NO: 15764 - protein, 208 aa, Homo sapiens
  DOMAIN (56)..(204): Elongation factor Tu family domain identified by PFam, accession name GTP_EFTU, E-value=7.1e-30, PFam score of 103.3
PLHLAEEKNGYNPDTVAFVPISGWNGDNMLEPSANMPWFKGWKVTRKDGNASGTTLLEALDCILPPTRPTDKPLRLPLQDDYKISGWNGDNMLEPSANMPWFKGWKVTRKDGNASGTTLLEALDCILPPTCPTDKPLRLPLQDVYKIGGIGTVPVGRVETGVLKPGMVVTFAPVNVTTEVKSVEMHHEALSETLPGDNVSFNVKNSVC

SEQ ID NO: 15765 - protein, 130 aa, Homo sapiens
  DOMAIN (64)..(130): Elongation factor Tu family domain identified by PFam, accession name GTP_EFTU, E-value=6.8e-22, PFam score of 76.4
ADIERLRMRRVMAAATHASAISGWNGDNMLEPSANMPWFKGWKVTRKDGNASGTTLLEALNCGIGTVPVGRVETGVLKPGMEVTFAPGNVTTEVKSVEKHHEALSEALSGDNAGFNVKNVSVKDVRRGNV

SEQ ID NO: 15766 - protein, 153 aa, Homo sapiens
  DOMAIN (114)..(128): GTP-binding elongation factors proteins domain identified by eMATRIX, accession number BL00301C, p-value=8.200e-15, raw score of 11.73
  DOMAIN (2)..(108): Elongation factor Tu family domain identified by PFam, accession name GTP_EFTU, E-value=4.3e-31, PFam score of 107.4
MLLEALDCILPPTRPTDKPLHLPLQDVYKIGGIGSVPVGRVETGVLKPGMVVTFAPVNVTTEVKSVEMHHEALSEALPGDNVGFNVKNVSVKDVRHGNVAGDSKNDPPMEAAGRFAVRDMRQTVAVGVIKAVDKKAAGAGKVTKSAQKAQKAK

SEQ ID NO: 15767 - protein, 247 aa, Homo sapiens
  DOMAIN (90)..(122): GTP-binding elongation factors proteins domain identified by eMATRIX, accession number BL00301B, p-value=2.080e-24, raw score of 20.09
  DOMAIN (5)..(169): Elongation factor Tu family domain identified by PFam, accession name GTP_EFTU, E-value=1.2e-84, PFam score of 288.0
MGKEKTHINIVVIGHVDSGKSTTTGHLIYKCSSIDKRTIEKFEKETAEMGKGSFKYGWVLDKLKAERERGITIDISLWKFETSKYYVTITDAPGHRDFIKNMITGTSQADCAVPIVAAGVGEFEAGISKNGQTREHALLAYTLGVKQLIVGVNKMDSTEPPYSQKRYEEMWLREVSTYIKKIGYNPDTVAFVPISGWNGNNMLEPSANMPWFKGWKVTRKDGNASGTMLLEGASQTIHLWVALLFVI

SEQ ID NO: 15768 - protein, 245 aa, Homo sapiens
  DOMAIN (20)..(245): Elongation factor Tu family domain identified by PFam, accession name GTP_EFTU, E-value=9.7e-45, PFam score of 153.4
  misc_feature (1)...(245): Xaa = X or * as defined in Table 2
NWFKGWKVTRKDGNASGTTLLEALDCILPPTRPTDKPLRLPLQDVYKIGGIGTVPVGRLETGVLKPGMVVTFATVNVTTEVKSVENHLVAPLDCPRTPFGPTRPSTYIKKIGYYPDTLAFEPISGWNGDDMLEPSANMPWFKGWKVTRKDGNASGTTLLEALDCILPPTRPTDKPLRLTIQDVYKIGGIGTVTVGRVETGVLKPGMVVTFAPVNGTTXVKSVAMHHEALSEAHSVDNVGFNVKNV

SEQ ID NO: 15769 - protein, 477 aa, Homo sapiens
  DOMAIN (22)..(54): GTP-binding elongation factors proteins domain identified by eMATRIX, accession number BL00301B, p-value=5.500e-31, raw score of 20.09
  DOMAIN (1)..(432): Elongation factor Tu family domain identified by PFam, accession name GTP_EFTU, E-value=1.1e-123, PFam score of 419.5
RGITIDISLWKFETSKYYVTIIDAPGHRDFIKNMITGTSQADCAVLIVAAGVGEFEAGISKNGQTREHALLAYTLGVKQLIVGVNKMDSTEPPYSQKRYEEIVKEVSTYIKKIGYNPDTVAFVPISGWNGDNMLEPSANMPWFKGWKVTRKDGNASGTTLLEALDCILPPTRPTDKPLRLPLQDVYKIGGIGTVPVGRVETGVLFVPISGWNGDNMLEPRANMPWFKGWKVTRKDGNASGTTLIEALDCILPPTRPTDKPLRLPLQDVYKIGGIGTGPVGRLETGVLKPGMVVTFAPGNVTTEVKSVETLHEALSEAFPGDNVGFNVKNVSVKDVRHGNVAGDSKNDPPMEAAGFTAQVIILNHPGQISTGYAPVLDCHTAHIACKFAELKEKIDHRSGKKLEDGPKFLKSVDAAIVDMVPGKPMCVESFSDYPSLGCFAVRDMRQIVTVGVIKAVDKKTAGAGKVTKSAQKAQKAK

SEQ ID NO: 15770 - protein, 107 aa, Homo sapiens
  DOMAIN (27)..(75): IMMUNOGLOBULIN V REGION domain identified by eMATRIX, accession number DM00031A, p-value=8.740e-29, raw score of 16.80
MDLLCKNMKHLWFFLLLVAAPRWVLSQVQLQESGPGLVKPSETLSLTCTVSDVSITSGNYFWAWIRQPPGKGLEWIGSKFHTGTNLYNESLKSRVTFSIDTSGSTRP

SEQ ID NO: 15771 - protein, 418 aa, Homo sapiens; identical to SEQ ID NO: 8354
  DOMAIN (90)..(122): GTP-binding elongation factors proteins domain identified by eMATRIX, accession number BL00301B, p-value=5.500e-31, raw score of 20.09
  DOMAIN (5)..(373): Elongation factor Tu family domain identified by PFam, accession name GTP_EFTU, E-value=5.6e-138, PFam score of 467.7

SEQ ID NO: 15772 - protein, 398 aa, Homo sapiens [sequence omitted]

SEQ ID NO: 15773 - protein, 466 aa, Homo sapiens
  DOMAIN (90)..(122): GTP-binding elongation factors proteins domain identified by eMATRIX, accession number BL00301B, p-value=5.500e-31, raw score of 20.09
  DOMAIN (5)..(425): Elongation factor Tu family domain identified by PFam, accession name GTP_EFTU, E-value=4.2e-137, PFam score of 464.7
MGKEKTHINIVVIGHVDSGKSTTTGHLIYKCGGIDKRTIEKFEKEAAEMGKGSFKYAWVLDKLKAERERGITIDISLWKFETSKYYVTIIDAPGHRDFIKNMITGTSQADCAVLIVAAGVGEFEAGISKNGQTREHALLAYTLGVKQLIVGVNKMDSTEPPYSQKRYEEMWLREVSTYIKKIGYNPDTVAFVPISGWNGDNMLEPSANMPWFKGWKVTRKDGNASATTLLEALDCILPPTRPTDKPLRLPLQDVYKIGGIGTDPAGRVKTGVLKPGMVVAPFAPVNGTTEVKSVEMHHEALSEALLLGDKGAFNVKNVSVKDVRRGNVAGDSKNDPPMEASGFTAQVIILNHPSQKNARHMPLELDCHTAHIACKFAELKEKIDRRSGKKLEDGPKFLKSGDAAIVDMVPGKPMCVESFSDYPPLGRFAVRDMRQTVAVGVIKAVDKKAAGAGKVTKSAQKAQKAK

SEQ ID NO: 15774 - protein, 211 aa, Homo sapiens
  DOMAIN (64)..(119): Sigma-54 interaction domain proteins ATP-binding region A proteins domain identified by eMATRIX, accession number BL00675B, p -value=7.290e-09, raw score of 24.07
  misc_feature (1)...(211): Xaa = X or * as defined in Table 2
ETEIKMASRGKTETSKLKQNLEEQLDRLMQQLQDLEECREELDTDEYEETKKETLEQLSEFNDSLKKIMSGNMTLVDELSGMQLAIQAAISQAFKTPKVIRLCGKKHHPVQLRPRXAEMDRDLMVGKLERDLYTQQKVEILTALRKLGEKLTADDEAFLSANAGAILSQFEKVSTDLGRPPSYMNYLLDSHPSKNIDVPSKISFLLKIQDL

SEQ ID NO: 15775 - protein, 129 aa, Homo sapiens
GTRSGNMTLVDELSGMQLAIQAAISQAFKTPEVILLFAKKQPGQLRTRLAEMDRDLMVGKLERDLYTQQKVEILTALRKLGEKLTADDEAFLSANAGAILSQFEKVSTDLGSGDKILALASFEVEKTKK

SEQ ID NO: 15776 - protein, 340 aa, Homo sapiens
FLASLQWVQTSSFSSEKFVITDLLKPTSVNLSKSFSVQLCSIAGGSLRPTPEIQEVKTPEELETFMLKHGENIIDTLGAEVDRLEKELKSGSLVPCIPAAPAVTKRGQGTAPAIASVGGSPKPWQLPRGVGPVGAQKSRTEVWKSLPRFQRMYGKHLDAQNDRSTDSLHSAPGKATDTQCQPLKAAKSGLYPAELKRWSCPWLWEPTFCISVTWSDLEQLRKIRRRSPHEDTESFTVYLRSDVEAKSLEVWGSPEALAREKKLRKEAEIEYREKGSINSATLIEFSRYLSDTRYRTRSCAWCLKCICKIIPTMANSCSPNTCSLCLLYSSPALPWTLKFA

SEQ ID NO: 15777 - protein, 171 aa, Homo sapiens
PLWWNSVIIAATCMGLTSITGNPLYDSLGSLGVGTLLGMVSAFLIYTNTEALLGRSIQPEQVQRLTELLENDPSVRAIHDVKATDLGLGKVRFKAEVDFDGRVVTRSYLEKQDFDQMLQEIQEVKTPEELETFMLKHGENIIDTLGAEVDRLEKELKKRNPEVRHVDLEIL

SEQ ID NO: 15778 - protein, 82 aa, Homo sapiens
GSTHASERRQNKTTTRTKVIPAASEEQLLLVELVRSISVMRAETVIQTVKEVLKQPPAIAKDKKHLSLEVCMLQFFYAYIQR

SEQ ID NO: 15779 - protein, 1377 aa, Homo sapiens
IPMVVSDFDLPDQQIEILQSSDSGCSQSSAGDNLSYEVDPETVNAQEDSQMPKESSPDDDVQQVVFDLICKVVSGLEVESASVTSQLEIEAMPPKCSDIDPDEETIKIEDDSIQQSQNALLSNESSQFLSVSAEGGHECVANGISRNSSSPCISGTTHTLHDSSVASIETKSRQRSHSSIQFSFKEKLSEKVSEKETIVKESGKQPGAKPKVKLARKKDDDKKKSSNEKLKQTSVFFSDGLDLENWYSCGEGDISEIESDMGSPGSRKSPNFNIHPLYQHVLLYLQLYDSSRTLYAFSAIKAILKTNPIAFVNAISTTSVNNAYTPQLSLLQNLLARHRISVMGKDFYSHIPVDSNHNFRSSMYIEILISLCLYYMRSHYPTHVKVTAQDLIGNRNMQMMSIEILTLLFTELAKVIESSAKGFPSFISDMLSKCKVQKVILHCLLSSIFSAQKWHSEKMAGKNLVAVEEGFSEDSLINFSEDEFDNGSTLQSQLLKVLQRLIVLEHRVMTIPEENETGFDFVVSDLEHISPHQPMTSLQYLHAQPITCQGMFLCAVIRALHQHCACKMHPQWIGLITSTLPYMGKVLQRVVVSVTLQLCRNLDNLIQQYKYETGLSDSRPLWMASIIPPDMILTLLEGITAIIHYCLLDPTTQYHQLLVSVDQKHLFEARSGILSILHMIMSSVTLLWSILHQADSSEKMTIAASASLTTINLGATKNLRQQILELLGPISMNHGVHFMAAIAFVWNERRQNKTTTRTKVIPAASEEQLLLVELVRSISVMRAETVIQTVKEVLKQPPAIAKDKKHLSLEVCMLQFFYAYIQRIPVPNLVDSWASLLILLKDSIQLSLPAPGQFLILGVLNEFIMKNPSLENKKDQRDLQDVTHKIVDAIGAIAGSSLEQTTWLRRNLEVKPSPKIMVDGTNLESDVEDMLSPAMETANITPSVYSVHALTLLSEVLAHLLDMVFYSDEKERVIPLLVNIMHYVVPYLRNHSAHNAPSYRACVQLLSSLSGYQYTRRAWKKEAFDLFMDPSFFQMDASCVNHWRAIMDNLMTHDKTTFRDLMTRVAVAQSSSLNLFANRDVELEQRAMLLKRLAFAIFSSEIDQYQKYLPDIQERLVESLRLPQVPTLHSQVFLFFRVLLLRMSPQHLTSLWPTMITELVQVFLLMEQELTADEDISRTSGPSVAGLETTYTGGNGFSTSYNSQRWLNLYLSACKFLDLALALPSENLPQFQMYRWAFIPEASDDSGLEVRRQGIHQREFKPYVVRLAKLLRKRAKKNPEEDNSGRTLGWEPGHLLLTICTVRSMEQLLPFFNVLSQVFNSKVTSRCGGHSGSPILYSNAFPNKDMKLENHKPCSSKARQKIEEMVEKDFLEGMIKT

SEQ ID NO: 15780 - protein, 138 aa, Homo sapiens
KEFSELVARIDYNDGEFLLIEAADFLPKWLDPENSTNRGFFCHGELCIIPAPIKFGAESWLPTTPPTIPQALNIITAHSEKILASKSIPSVVNRRITGYPEKIQASLNRAHCFLPAGIVAVLKQRPRLVAAAVQAFLL

SEQ ID NO: 15781 - protein, 63 aa, Homo sapiens
FSSEHINQACEMHPPPCPSYFKPSVVHSTVCTTSLFKHSSVFLAPKQIWVRFVYAETTYEEGP

SEQ ID NO: 15782 - protein, 65 aa, Homo sapiens
AYWGRKTPWLTISSFWPTPGSPYYDNVRPLCYSDSDAVLLCFDISRPKTVDSALKKVRLDQLSNL

SEQ ID NO: 15783 - protein, 71 aa, Homo sapiens
  misc_feature (1)...(71): Xaa = X or * as defined in Table 2
MSFDCGFGTLPLLLSPICCLGSYSNKVISPGLXXXXXXXXXXGGALLKDPWGGPIFPGGGKKFFFLFGGGF

SEQ ID NO: 15784 - protein, 45 aa, Homo sapiens
  misc_feature (1)...(45): Xaa = X or * as defined in Table 2
MRGVFPLFPLKXXXXPKGLKIXXXXGPIMSPPQKKVPFQKSQGGF

SEQ ID NO: 15785 - protein, 59 aa, Homo sapiens
  misc_feature (1)...(59): Xaa = X or * as defined in Table 2
TLKFWKEGGPPISPPQKKGPFPKIPRGGLXGPPKKKKNFSFPPPVKLGPPKGIFKRAPP

SEQ ID NO: 15786 - protein, 151 aa, Homo sapiens
TPRQARHEGEDFVSVSPQHLHKFLASIDLNIENEKQVYNAAIKWLLANPQHHSKWLDETLAQVRLPLLPVDFLMGVGAKEQIVKQNLKCRDLLDEARNYHLHLSSRAVPDFEYSIRTTPRKHTAGVLFCVSGRGGSGDPFRSIECYSINKN

SEQ ID NO: 15787 - protein, 132 aa, Homo sapiens
  DOMAIN (4)..(24): Protein phosphatase 2C domain identified by PFam, accession name PP2C, E-value=0.0032, PFam score of 14.9
HASANAGDSRAIIVRNGEIIPMSREFTPETERQRLQLLGFLKPELLGREFTHLEFPRRVLPKELGQRMLYRDQNMTGWAYKKIELEDLRFPLVCGEGKKARVMATIGVTRGLGDHSLKVCSSTLPIKPFLSC

SEQ ID NO: 15788 - protein, 217 aa, Homo sapiens
NFTLQKQTAGWIWPMSCSLTTLGLEHSLPRPATEPLERPSRSHIAPTEYSQLVPLSSCGCEGLLPLPQATITSHSHPEAGPGLEARTPELQLFSGQLSFWSAAEETKTRPPQARATKPPKPKSSWQRSCISSEESETPGLPIDFPSCPYALVRLPLRSSLSSQEVRVPQGSSRAKSLPAREWEAWPHPATATVRAWAWPCSGVPLMERGGSRSGPGR

SEQ ID NO: 15789 - protein, 411 aa, Homo sapiens
  misc_feature (1)...(411): Xaa = X or * as defined in Table 2
PTITNVWSETSQELADGLRRGSQGDSVQQNGPPRKHIVERYTEFYHVPTHSDASKKRLIEDTEDWRPRTGTTQSRSFRILAQITGTEHLKESEADNTEKANNSQEPSPQLASSVASTRSMPESLDSPTSGRPGVTSLTTAAAFKPVGSTGVIKSPSWQRPNQGVPSTGRISNSAAYSGSVAPANSALGQTQPSDQDTLVQRXPTITNVWSETSQELADGLRRGSQGDSVQQNGPPRKHIVERYTEFYHVPTHSDASKKRLIEDTEDWRPRTGTTQSRSFRILAQITGTEHLKESEADNTEKANNSQEPSPQLASSVASTRSMPESLDSPTSGRPGVTSLTTAAAFKPVGSTGVIKSPSWQRPNQGVPSTGRISNSAAYSGSVAPANSALGQTQPSDQDTLVQRAEHIPAGN

SEQ ID NO: 15790 - protein, 102 aa, Homo sapiens
MTHLEAQNKIKGCTGSLNMTLQRASAAPKPEPGSCSKAHSHQRVFRDFSGASRGTREEDPRVTVNTQNGKIPPKRPPRKPHCGALYRVLSCTHFTVMPARRD

SEQ ID NO: 15791 - protein, 141 aa, Homo sapiens
SASVAVVGEFGPAQLGLGHLQPNPGKPGSSQWSPVPGSSTVALLCPRPATASELIKFPLSSQAQNSCKWSYIRKGPARSSIPSPFLASADSCRVVSCPDQPRAPCRGQCWPGGVGAASALPWQPAPSLTFIPASYSAPTRP

SEQ ID NO: 15792 - protein, 64 aa, Homo sapiens
PSATPRQTGPATTMNSKGQYPTQPTYPVQPPGNPVYPQTLHLPQAPPYTDAPPAYSEVLPVCQI

SEQ ID NO: 15793 - protein, 102 aa, Homo sapiens
SCHIIPSLTFPTRFIQRSPVTLLRSQVVILILQWAIASTTLDLRDANCSVMRFVRDLIHTGVANDVSIKMIPFLLNSFYLLSLCHSLGENQHPSISFLDLYW

SEQ ID NO: 15794 - protein, 54 aa, Homo sapiens
IESPETNSCIDGQLLFDGGIRITHWAKDSSSSSSSSSSSSSTCRRMKLDPYLTP

SEQ ID NO: 15795 - protein, 69 aa, Homo sapiens
HTTASPFWQGLTNVRCRNTSLTTFQVIPDLDGWFHAQPVQLQLLSHPVTEFILPPSLVLPLPGESHFLL

SEQ ID NO: 15796 - protein, 77 aa, Homo sapiens
  misc_feature (1)...(77): Xaa = X or * as defined in Table 2
MRMVTWWRGVFLATSPSPPRPSQLEKQYTALYRKATSPNXFAPNCYPDPQPHLGXLAPVAHVPLXQRRKAESPPSSN

SEQ ID NO: 15797 - protein, 246 aa, Homo sapiens
  misc_feature (1)...(246): Xaa = X or * as defined in Table 2
MVSDIRKEDGMNVLPLKYIPNVGVNFSFAGVYLASETLPGSFAHPEATSRGAVATGTTHLASAVEPNGDSWCKQRSPRVSVHYIRINITGWVCTCCDIERNIMLSPSLNIRNNITARLRPKTGTQMPLREQRYTGIDENAHVVERRVFRVPALHLRRPSQLEKQYIALYRKATSPNXFAPNCYPDPQPHLDRLAPVAHFPLXQXRKAESPPSSNXVARGTCTSXLSKPRTVWKDPVARNRPPVGPT

SEQ ID NO: 15798 - protein, 60 aa, Homo sapiens
GLALTPRTAGGGGLTALRRGSLEPGRGRGWLLLPVSQEVCTTPAILGVISSSPPRILGTR

SEQ ID NO: 15799 - protein, 106 aa, Homo sapiens
VDDLLLGHPTAVGCTKGTDALHRHLEDCGYKVSKKKAQICRQQPWASVDWELYVDGNSFFNPQGERGAGCAVVTLDTVVEARSLPQATAAQKAELIAFIGALELSE

SEQ ID NO: 15800 - protein, 156 aa, Homo sapiens
  misc_feature (1)...(156): Xaa = X or * as defined in Table 2
GSQSQGGNRGWFSVPASRGVPPPAVMGVLRARGGRGAGSQSPPPGGCLPPMRWGSGATRSLGLWWETSDGLEPTPSRRWWGSSXTLGGSPVQVYXLVTPDSGSSHXKANSFCLSGDNLIGKKASFRSKQVNQLSSAGSKPNNVDGLGTVGCKVSVA

SEQ ID NO: 15801 - protein, 58 aa, Homo sapiens
  misc_feature (1)...(58): Xaa = X or * as defined in Table 2
GWAHGGEACFCVPALHLCRPSQLEKQYPVLYXKATSSNXFAPNYYPDPXPHLGXLPPW

SEQ ID NO: 15802 - protein, 68 aa, Homo sapiens
  misc_feature (1)...(68): Xaa = X or * as defined in Table 2
ELQLYWLCKKPPIDIRSHWKSCXAGISTSRLCQLLPKRXGSGVLPADSMMRGKVSRSAWHRSLWSSPL

SEQ ID NO: 15803 - protein, 263 aa, Homo sapiens
KMTSSSEQEEDEKNNQSATPRQTGPATTMNSKGQYPTQPTYPVQPPGNPVYPQTLHLPQAPPYTDAPPAYSELYRPSFVHPGAATVPTMSAAFPGASLYLPMAQSVAVGPLGSTIPMAYYPVGPIYPPGSTVLGGKGGYDAGARFGAGATAGNIPPPPPGCPPNAAQLAVMQGANVLVTQRKGNFFMGGSDGGYTHLVRNQGHLCAREKTSHTLQHFSQCNCFSHINLKLQFRHMLLGCLSGAQTFRHFSNLIRNHVMVAVPP

SEQ ID NO: 15804 - protein, 206 aa, Homo sapiens
  misc_feature (1)...(206): Xaa = X or * as defined in Table 2
PAFFLIPGCAPPVGXXIPSNVPAVGRSDFFSWTPYTHSPPDAGVEHPFPWRTRLPWGVPAKGHQRTGATRSLGFWWDTSGGLEPTPPRRWWGSSXTLEEARSKCTEXXHLTPDLPTERQTASGSQGRIXCXRKHLSWSKQVKQLSSAGSNPSNVYGLGDCWMXSHCSLLNQAQILSRPVVLGLRLGNRQEGSVPWRLTRNYHSKGS

SEQ ID NO: 15805 - protein, 343 aa, Homo sapiens
  DOMAIN (68)..(101): RECEPTOR INTERLEUKIN-1 PRECURSOR domain identified by eMATRIX, accession number PD02870B, p-value=7.319e-09, raw score of 18.83
  DOMAIN (232)..(316): Integrase core domain identified by PFam, accession name rve, E-value=4.6e-09, PFam score of 35.3
MGSCMARASPMGATPCFAAVGPIDCQAEECRHTVWDWWVALPTAAVGDPIGQPIQYARSTCEAGVGELHIQDALPEDHGTYTCLAENALGQVSCSARVTVREGTSPGPKGKTGHCGLGSVSPLGMKELALMENVAEPGSVKLSARTVQVQPSLALSVAPGHGGEHGCGASGLGVDDLLLGHPTAVGCATGTDAPHRHLEDCGYKVSKKKAQICQQQHDARQGPAVPPGIQAYGAAPFEDLQVDFREMPKCGGNKYVLVLGRTYSGWVEAYPTRTEKTREVTPVLLRDLIRRFRPPLWIGSDNGPAFLAALVQKTAKGIQNNITGGVYTLCDIDSHIILFRSGY

SEQ ID NO: 15806 - protein, 603 aa, Homo sapiens
  DOMAIN (409)..(449): G-protein coupled receptors proteins domain identified by eMATRIX, accession number BL00237A, p-value=8.457e-13, raw score of 27.68
  DOMAIN (360)..(603): 7 transmembrane receptor (rhodopsin family) domain identified by PFam, accession name 7tm_1, E-value=1.4e-10, PFam score of 35.7
EENCRNRLGLQGRIHPQLLQIASQVFVNRYAVSRKENGKENGGQARPHADLFVSCSNQRGPRKEARERGPWERNSAWLSEFAALMTFCWDTPRQSGVPREQMPYTAPGGLWVEGVQEESSDLPTADGVSKGWPPCWRALAATALLVQEANKLTLGRNLNIKASRAVVTLMNTKGHHWLTDARLIKYQTLLCENPRITIEVCNTLHPASLLPVSESTVEPDCVEVLDSVDSSRPDLRDQAWASGDWKLYVYGSSFFNPQGERGLQVDFTFTEMPKCGGNKHVLVLGRTYSGWVEAYPTRTEKAGEVIPVLLRDVIPRFRPPLWIGSDNGPAFLAALVQKTAKPALALLSLSLSMYLVTVLRNLFSILAVSSDCPLHTPMYFFLSNLCWPDIGFTSAMVPKMIVDTQSHSRVISHAGCLTQMSFLLLVACIEGMLLTVMAYDCFVAICRPLHYPVIVNPHLCVFFVLVSFFLSLLDSQLHSWIVLQLTIIKNVEISNLVCDPSQLLNLACSDSVINNIFIYFDSTMFGFLPISGIFLSYYKIVPSILRISSSDGKYKAFSTCGCHLAVVCWFYGTGIGMYLTSAVSPPPRNGVVASVMYAVVTPC

SEQ ID NO: 15807 - protein, 131 aa, Homo sapiens
  DOMAIN (2)..(131): Amidase domain identified by PFam, accession name Amidase, E- value=9.9e-05, PFam score of 19.9
SILKLPQWLKGLLAFLVKPLLPRLSAFLSNMKSRSAGKLWELQHEIEVYRKTVIAQWRALDLDVVLTPMLGPALDLNAPGRATGVVPVTTVTAEDEAQMEHYRGYFGDIWDKMLQKGMKKSVGLPVAVQCV

SEQ ID NO: 15808 - protein, 590 aa, Homo sapiens
  DOMAIN (217)..(269): Amidases proteins domain identified by eMATRIX, accession number BL00571, p-value=1.000e-40, raw score of 25.69
  DOMAIN (106)..(574): Amidase domain identified by PFam, accession name Amidase, E- value=3.2e-147, PFam score of 502.5
PGGRQQQAEGIMVQYELWAALPGASGVALACCFVAAAVALRWSGRRTARGAVVRARQKQRAGLENMDRAAQRFRLQNPDLDSEALLALPLPQLVQKLHSRELAPEAVLFTYVGKAWEVNKGTNCVTSYLADCETQLSQAPRQGLLYGVPVSLKECFTYKGQDSTLGLSLNEGVPAECDSVVVHVLKLQGAVPFVHTNVPQSMFSYDCSNPLFGQTVNPWKSSKSPGGSSGGEGALIGSGGSPLGLGTDIGGSIRFPSSFCGICGLKPTGNRLSKSGLKGCVYGQEAVRLSVGPMARDVESLALCLRALLCEDMFRLDPTVPPLPFREEVYTSSQPLRVGYYETDNYTMPSPAMRRAVLETKQSLEAAGHTLVPFLPSNIPHALETLSTGGLFSDGGHTFLQNFKGDFVDPCLGDLVSILKLPQWLKGLLAFLVKPLLPRLSAFLSNMKSRSAGKLWELQHEIEVYRKTVIAQWRALDLDVVLTPMLAPALDLNAPGRATGAVSYTMLYNCLDFPAGVVPVTTVTAEDEAQMEHYRGYFGDIWDKMLQKGMKKSVGLPVAVQCVALPWQEEVCLRFMREVERLMTPEKQSS

SEQ ID NO: 15809 - protein, 37 aa, Homo sapiens
PSWLVTTLLLPSSAGKLWELQHEIEVYRKTVICQWRA

SEQ ID NO: 15810 - protein, 115 aa, Homo sapiens
SSPPAWQPRPPCGGLHHCPACVHPHRDSGGSVPAPAACCHTPHGRPWPEFEGQRPQTQPQPQGPAWVRPVLTLSAGRVASVPLVSLCAWASGSQPGPPTGGSGRAICTGLGAPPA

SEQ ID NO: 15811 - protein, 28 aa, Homo sapiens
EQHFLPLRILKQEHPELAVLADSVDLQE

SEQ ID NO: 15812 - protein, 40 aa, Homo sapiens
HWHKNKQIDQWIKIKNPKTNPPTYRELIFGQGAQNNTWGK

SEQ ID NO: 15813 - protein, 34 aa, Homo sapiens
HWLKNKQIDQWIRIKNPETNPHTYSELIFDKGAK

SEQ ID NO: 15814 - protein, 91 aa, Homo sapiens
  DOMAIN (27)..(81): Heat shock hsp90 proteins family proteins domain identified by eMATRIX, accession number BL00298I, p-value=1.000e-40, raw score of 30.07
  DOMAIN (3)..(91): Hsp90 protein domain identified by PFam, accession name HSP90, E-value=2.3e-55, PFam score of 197.3
LQVVVSNRVVTSPCCIVTSTYGWTANMERIMKAQALRDNSTMGYMAAKKHLEINPDHSIIETLRQKAEADKNDQSVKDLVILLYETALLSS

SEQ ID NO: 15815 - protein, 166 aa, Homo sapiens
LVILDYIIRNTDRGNDNWLVRYEKQKCEKEIDHKESKWIDDEEFLIKIAAIDNGLAFPFKHPDEWRAYPFHWAWLPQAKVPFSEEIRNLILPYISDMNFVQDLCEDLYELFKTDKGFDKATFESQMSVMRGQILNLTQALRDGKSPFQLVQIPCVIVERSQGGSQG

SEQ ID NO: 15816 - protein, 105 aa, Homo sapiens
NKKSQESEGQLSQGLKPASFQPGVVVIHPPGVSRVPTVALGTCQPPSSQEQIPSHRSFSPDTEMGVSPAGSGSLETPANTHPAGPAGHLSCPGVSQVKPAVAGGK

SEQ ID NO: 15817 - protein, 45 aa, Homo sapiens
  misc_feature (1)...(45): Xaa = X or * as defined in Table 2
MSRQWIPXSRQKFEADCPGESGSSGKRTLTRSWCRSCCCVLXNXS

SEQ ID NO: 15818 - protein, 129 aa, Homo sapiens
  DOMAIN (8)..(51): Purine and other phosphorylases family 1 proteins domain identified by eMATRIX, accession number BL01232C, p-value=2.000e- 14, raw score of 31.85
LAEWRPREPMQRKLKVTSLEPGTVVITEQAVDTCFKAEFEQIVLGKRVIRKTDLNKKLVQELLLCSAELSEFTTVVGNTMCTLDFYEGQGRLDGALCSYTEKDKQAYLEAAYAAGVRNIEMESSVFAAI

SEQ ID NO: 15819 - protein, 124 aa, Homo sapiens
  DOMAIN (112)..(123): Purine and other phosphorylases family 1 proteins domain identified by eMATRIX, accession number BL01232D, p-value=4.600e- 11, raw score of 11.32
EQNWMLRVWMCGWICFFLPYALLCAPWLPCFNFILFYTPAISLDVWLFFPPGLGSPGTVVITEQAVDTCFKGRVLSRIVLGKRVIRKTDLNKKLVQELLLCSAELSEFTTVVGNTMCTLDFYER

SEQ ID NO: 15820 - protein, 354 aa, Homo sapiens
  DOMAIN (178)..(221): Purine and other phosphorylases family 1 proteins domain identified by eMATRIX, accession number BL01232C, p-value=5.629e- 23, raw score of 31.85
  DOMAIN (96)..(354): Phosphorylase family domain identified by PFam, accession name PNP_UDP_1, E-value=0.013, PFam score of -54.3
GDSRSRVTRRQDTAWNAWSASHCRRLSASSRSPLTGPASVGGMAATGANAEKAESHNDCPVRLLNPNIAKMKEDILYHFNLTTSRHNFPTLFWEFKFGLFGGNPSRMKPFIRCLGPEIGLDCPVRDYPNICAGTDRYAMYKVGPVLSVSHGMGIPSISIMLHELIKLLYYARCSNVTIIRIGTSGGIGLEPGTVVITEQAVDTCFKAEFKQIVLGKRVIRKTDLNKKLVQELLLVSAELSEFTTTVVGNTMCTLDFYEGQGRLDGALCSYTEKDKQAYLEAAYAARVPQLFEMESSVFAAMCSACGLQAAVVCVTLLNRLEGDQISSPRNVLSEYQQRPQRLVSYFIKKKLSKA

SEQ ID NO: 15821 - protein, 111 aa, Homo sapiens
QWYSFNDQHVSRITQEDIKKTHGGSSGSRGYYSSAFASSTNAYMLIYRLKDPARNAKFLEVDEYPEHIKNLVQKERELEEQEKRQREIERNTCKIKLFCLHPTKQVMMENK

SEQ ID NO: 15822 - protein, 124 aa, Homo sapiens
  DOMAIN (11)..(46): Glyceraldehyde 3-phosphate dehydrogenase proteins domain identified by eMATRIX, accession number BL00071C, p-value=5.821e- 30, raw score of 11.81
  DOMAIN (1)..(124): glyceraldehyde 3-phosphate dehydrogenases domain identified by PFam, accession name gpdh, E-value=3.7e-54, PFam score of 183.5
NHEKDDNSLKIISNASCTTNWLTPLAKGIHDNFGIVEGLMTTVHAITATQKTGDGPSGNWGVMAAGLSKTSSLPLLGLGKAGGKVIPELNGKLTGMAFRVPTGNVAGVDLTCRLKKPGKYDDIK

SEQ ID NO: 15823 - protein, 373 aa, Homo sapiens
  DOMAIN (177)..(212): Glyceraldehyde 3-phosphate dehydrogenase proteins domain identified by eMATRIX, accession number BL00071C, p-value=1.643e- 39, raw score of 11.81
  DOMAIN (27)..(373): glyceraldehyde 3-phosphate dehydrogenases domain identified by PFam, accession name gpdh, E-value=3.3e-109, PFam score of 367.5
  misc_feature (1)...(373): Xaa = X or * as defined in Table 2
IRHEVRQSAASSFASPAEPHRSDTMGKVKVGVNGFGRIGRLVTRAAFNSGKVDIVAINDPFIDLNYMVYMFQYDSTHGKFHGTVKAENGKLVINGNPITIFQEPKIPSKIKVGGDAGRLKYVVEFHLAVFTTMEKGLGASFCRGGAKRVNQSLPPSGXCPPCFGHGVXTIEKYDNSLKIISNASCTTNCLTPLAKVIHDNFGIVEGLMTTVHAITATQKTVGWALPGNCGVMGPRGSSRTSSLPLLAAAKAVGKVNPLSLNGEAHLGMGFRVPNANVSVVDLTCRLEKPAKYDDIKKVVKQASEGPLKGILGYTEHQVVSSDFNSDTHSSTFDAGAGIALNDHFVSRLISWYDNEFGYSNRVVDLMAHMASKE

SEQ ID NO: 15824 - protein, 124 aa, Homo sapiens
QFEFSIDSFQIILDSLLLFGQGSSTPMSEAFHPTVTGESLYGDFTEALEHLRHRVIATRSPEEIRGGGLLKYCHLLVRGFRPRPSTDVRALQRYMCSRFFIDFPDLVEQRRTLERYLEAHFGGA

SEQ ID NO: 15825 - protein, 86 aa, Homo sapiens
  misc_feature (1)...(86): Xaa = X or * as defined in Table 2
KRGFVLPPGLECGGPIWVNGRLRLLGLPPFSGLSFPGSWDYGGLPPGRVKIWHFLEKRGFRGVARVGSTLLTGEPPVLGFXKPPFF

SEQ ID NO: 15826 - protein, 205 aa, Homo sapiens
  DOMAIN (6)..(141): Hsp90 protein domain identified by PFam, accession name HSP90, E-value=7.2e-17, PFam score of 69.5
  misc_feature (1)...(205): Xaa = X or * as defined in Table 2
KTYWRKKVEKVVVSNRLVTSPCCIVTSTYGWTANMGENHXKLQALKETTSTMGYYMASQRKHRGIKPLTLSIIEYLKAKRPEGLIRTDKSVKDLVILLYETALLSSGFQSWKIPRHHAXQVSYRMIKLGLGIDEDGPYLLDDTSAAVNLKELPPLEGDDDTFTHGKEVGLILLGLRGWTLPVSVLYNSSDNIFFQGCFPLFLVNI

SEQ ID NO: 15827 - protein, 98 aa, Homo sapiens
VLLSIFFQRDVDNLPCLQHLFLSFNNISSFDRVSCLADSSSLSDITFDGNPIAQESWYKHTVLQNMMQLRQLDMKRITEEERRMASVLAKKEEEKKRE

SEQ ID NO: 15828 - protein, 168 aa, Homo sapiens
  DOMAIN (57)..(71): LEUCINE-RICH REPEAT SIGNATURE domain identified by eMATRIX, accession number PR00019B, p-value=7.840e-09, raw score of 11.36
  DOMAIN (15)..(102): Leucine Rich Repeat domain identified by PFam, accession name LRR, E-value=1e-09, PFam score of 45.7
  misc_feature (1)...(168): Xaa = X or * as defined in Table 2
KNRIKKISNLENLKSLDVLDLHGNQITKIENINHLCELRVLNLARNFLSHVDNLNGLDSLTELNLRHNQITFVRDVDNLPCLQHLFLSFNNISSFDSVSCLADSSSLSDITFDGNPIAQESWYKHTVLQNMMQLRHXDMEGEFTGRRKGVWHLFXPKKGGKRKEPGKS

SEQ ID NO: 15829 - protein, 127 aa, Homo sapiens
LKIIACLSLITNNMVGAITGGLPELASRLTRISAVLLEGMNKETFNLKEVLNSIGIQTCVEVNKTLMERGLPTLNAEIQANLIGQFSSIEEEDNPIWSLIDKRIKLYMRRLLCLPSPQKCMPPMPGG

SEQ ID NO: 15830 - protein, 143 aa, Homo sapiens
  DOMAIN (8)..(119): Immunoglobulin domain identified by PFam, accession name ig, E-value=0.0003, PFam score of 18.7
  misc_feature (1)...(143): Xaa = X or * as defined in Table 2
ERVGNVCSLEISNIQKGEGGEYMCHAVNIIGEAKSFANVDIMPQEERVVALPPPEFCRSKYGFKGGRRQRTKNXFRIFEMPPRFIMPICDFKIPENSDAVFKCSVIGIPTPEVKWYKEYMCIEPDNIKYVISEEKGSHTLIIR

SEQ ID NO: 15831 - protein, 4021 aa, Homo sapiens
  DOMAIN (2663)..(2687): Receptor tyrosine kinase class III proteins domain identified by eMATRIX, accession number BL00240B, p-value=5.404e-09, raw score of 24.70
  DOMAIN (3)..(3940): Immunoglobulin domain identified by PFam, accession name ig, E-value=2e-117, PFam score of 383.4
MVVEWLHDGKPLEAANRLRMINEFGYCSLDYGVAYSRDSGIITCRATNKYGTDHTSATLIVKDEKSLVEESQLPEGRKGLQRIEELERMAHEGALTGVTTDQKEKQKPDIVLYPEPVRVLEGETARFRCRVTGYPQPKVNWYLNGQLIRKSKRFRVRYDGIHYLDIVDCKSYDTGEVKVTAENPEGVIEHKVKLEIQQREDFRSVLRRAPEPRPEFHVHEPGKLQFEVQKVDRPVDTTETKEVVKLKRAERITHEKVPEESEELRSKFKRRTEEGYYEAITAVELKSRKKDESYEELLRKTKDELLHWTKELTEEEKKALAEEGKITIPTFKPDKIELSPSMEAPKIFERIQSQTVGQGSDAHFRVRVVGKPDPECEWYKNGVKIERSDRIYWYWPEDNVCELVIRDVTAEDSASIMVKAINIAGETSSHAFLLVQAKQLITFTQELQDVVAKEKDTMATFECETSEPFVKVKWYKDGMEVHEGDKYRMHSDRKVHFLSILTIDTSDAEDYSCVLVEDENVKTTAKLIVEGAVVEFVKELQDIEVPESYSGELECIVSPENIEGKWYHNDVELKSNGKYTITSRRGRQNLTVKDVTKEDQGEYSFVIDGKKTTCKLKMKPRPIAILQGLSDQKVCEGDIVQLEVKVSLESVEGVWMKDGQEVQPSDRVHIVIDKQSHMLLIEDMTKEDAGNYSFTIPALGLSTSGRVSVYSVDVITPLKDVNVIEGTKAVLECKVSVPDVTSVKWYLNDEQIKPDDRVQAIVKGTKQRLVINRTHASDEGPYKLIVGRVETNCNLSVEKIKIIRGLRDLTCTETQNVVFEVELSHSGIDVLWNFKDKEIKPSSKYKIEAHGKIYKLTVLNMMKDDEGKYTFYAGENMTSGKLTVAGGAISKPLTDQTVAESQEAVFECEVANPDSKGEWLRDGKHLPLTNNIRTVKIKKTLKNLTVTETQDAVFTVELTHPNVKGVQWIKNGVVLESNEKYAISVKGTIYSLRIKNCAIVDESVYGFRLGRLGASARLHVETVKIIKKPKDVTALENATVAFEVSVSHDTVPVKWFHKSVEIKPSDKHRLVSERKVHKLMLQNISPSDAGEYTAVVGQLECKAKLFVETLHITKTMKNIEVPETKTASFECEVSHFNVPSMWLKNGVEIEMSEKFKIVVQGKLHQLIIMNTSTEDSAEYTFVCGNDQVSATLTVTPIMITSMLKDINAEEKDTITFEVTVNYEGISYKWLKNGVEIKSTDKCQMRTKKLTHSLNIRNVHFGDAADYTFVAGKATSTATLYVEARHIEFRKHIKDIKVLEKKRAMFECEVSEPDITVQWMKDDQELQITDRIKIQKEKYVHRLLIPSTRMSDAGKYTVVAGGNVSTAKLFVEGRDVRIRSIKKEVQVIEKQRAVVEFEVNEDDVDAHWYKDGIEINFQVQERHKYVVERRIHRMFISETRQSDAGEYTFVAGRNRSSVTLYVNAPEPPQVLQELQPVTVQSGKPARFCAVISGRPQPKISWYKEEQLLSTGFKCKFLHDGQEYTLLLIEAFPEDAAVYTCEPKNDYVPEVVSPDQEMPVYPPAIITPLQDTVTSEGQPARFQCRVSGTDLKVSWYSKDKKIKPSRFFRMTQFEDTYQLEIAEAYPEDEGTYTFVASNAVGQVSSTANLSLEVSFKKEPLGQKPSFIQPLSSLRVHNGETVRFHARVSGIPKPEIQWFHNQQLILPTKDVVFHFEESTGMALMLIVDAYSEHAGQYSCKAANSAGEATCAATLTVTPKVQALDRQSSGKDVRESAKSQAVADSSFTKEESKISQKEIKSFQGSSYEYEVQVFESVSQSSIHTAASVQDTQLCHTASLSQIAESTELSKECAKESTDDSFIDVTWTHEGAKIEESERLKQSQNGNIQFLTICNVQLVDQGLYSCIVHNDCGERTTSAVLSVEAPESILHERIEQEIEMEMKELFSEGESEHSERDTRDAFSDSEDIDHKSMAAKRYASRISSTSSWPEYFKPSFTQKLTFKYVLEGEPVVFTCRLIACPTPEMTWFHNNRPIPTGLRRIIKAESDLHHHSSSLEIKRVQDRDSGSYRLLAINSEGSAESTASLLVIQKGQDEKYLEFLKRAERTHENVEALVERGEDRIKVDLRFTGSPFNKKQDVEQKGMMRTIHFKTMSSAKKTDYMYDEEYLESKSDIRGWLNVGESFLDKETKVKLQRLREARKTLMEKKKLSLLDTSSEISSRTLRSEASDKDILFSREDMKIRSMSDLAESYKVDHSAESIVQNPHALSNQMDQNIESEELPTSFQTIVDEEIFQTEIRMSQEALVKESLPKDHLYGEILVNENTQARGQLEEIMANTTIGESSTYITNVCEKEEVYETPENVSQAITPHASESFGTLVNVEESEEIASERIKKDDLRELQLSASTRIDEFKTEQKEENMRFFENSFRKRPQRCPPSFLQEIESQEVYEGDSCNFVCHFQGYPQPIVTWYNNDMPIPRNQNFIIHSLENYSILTLSSVHHQNEGSITCVLFNQYGTVKTTSMLKVKAKQKHDVKAHKVPVFHDYLDEEEELALVFDQAKGAHPSMSQEGQTNLHLLKTNPPVPPSGDTELLSFPVEIQVTAATPIPEQDKESKEVFQTEELEPKAMPQDQVTQSPKHRFVFLSDITNEPPKMLQEMPKHARCREGDSIILECLISGEPQPVVTWFQNGVLLKQNQKFQFEEVNCSHKLYIKDVNSQDSGKYKCVAENNSGAVESVSDLTVEPVTYRENSQFENIGEIYGKYSRDQQLQDQGESVRAHFYDYPAGPFTPWTNVKEYSVRDYFQSLETIEQIDQKEQVRCIPSREKIPRFVHGASRTIKISKPIRAEFIQCQAEGKERHVSEKSKLHQAEGTVYPFVDDFSDVTIKKEIRNNFGKLGRSEKENVQECAQSDYLPNIHSERISDSYNTKDSSAIVYEESLGEEIHYPGKKVKHRIIEFEKLHVEKGVLEKRPTRTSIVNPPQKKIDDKAFSLKQRESRSSNLNANMYQAEKMSPNTESDSSNIAINLKLLSSQTHKEFDAQEREQQEKISLIDKPAISKRAEHESPITFDLKQFHTQIKHTDVKFQELDSGQPEEAYFKIQHPADTENIVFDLKQMYSHIGDPALEFQGQETREQQEIHYKEKIPSPETLQPDTHNISKSVQNNVFASQEISSSQELSNRTMVEKSSIDENSISLEKEVRHVQEQNLDILKTDLSLKSFSEEIYSESCALLPTSSADIEETDLSEKSCPLENGGRSSISHLKKAASEEKPLGVGEMEEECTLEPELAAFPKQDGGTQEYTDATLEDHRGDVQEADTLHRQLSLSQCFPLLMTEEQQNPGEQISTNIHASGEEKCYEEVQVQNEASFSTLEGEMIETSFSQNIPKLDEAHTTEAAESETSLTQYLLAAGKREVPETKDTRDQAKLVQSESITSMEVEEVTFNTVYEYYNQKQESLGRPLSPESDISIGVGSTTSEEISELDQFYTPPSSVEYFESPKSPDLYFNPSDITKQSSIHSGGETVERYSTPLGEVAERYSTPSEGEVGERYSTPPGETLERYSTPPGETLERYSTPPGETLERYSTPPGETLERYSTPPGETLERYSTPPGEALERYSIPTGGPNPTGTFKTYPSKIEREDGTPNEHFYTPTEERGSAYEIWRSDSFGTPNEAIEPKDNEMPPSFIEPLTKRKVYENTTLGFIVEVEGLPVPGVKWYRNKSLLEPDERIKMERVGNVCSLEISNIQKGEGGEYMCHAVNIIGEAKSFANVDIMPQEERVVALPPPVTHQHVMEFDLEHTTSSRTPSPQEIVLEVELSEKDVKEFEKQVKIVTVPEFTPDHKSMIVSLDVLPFNFVDPNMDSREGEDKELKIDLEVFEMPPRFIMPICDFKIPENSDAVFKCSVIGIPTPEVKWYIVYMCVEPDNIGDVISEEKGSHTLTTRNVCLSDSATYRCRAVNCVGEAICRGFLTMGDSEIFAVIAKKSKVTLSSLMEELVLKSNYTDSFFEFQVVEGPPRFIKGISDCYAPIGTAAYFQCL

SEQ ID NO: 15832 - protein, 127 aa, Homo sapiens
DDTRYHTMQAAVDAVARVTGQHPEVPPAFWNNAFTLLSAVSLPRREPTVSSFYVKRAELWDTWKVAHLKEHRRVFQAMWLSFLKHKLPLSLYKKVLLIVHDAILPQLAQPTLMIDFLTRACDLGGAL

SEQ ID NO: 15833 - protein, 559 aa, Homo sapiens
  DOMAIN (256)..(277): GTP1/OBG GTP-BINDING PROTEIN FAMILY SIGNATURE domain identified by eMATRIX, accession number PR00326A, p-value=5.979e- 14, raw score of 8.75
  DOMAIN (129)..(404): GTPase of unknown function domain identified by PFam, accession name MMR_HSR1, E-value=5.9e-48, PFam score of 172.7
KRPKLKKASKRMTCHKRYKIQKKVREHHRKLRKEAKKQGHKKPRKDPGVPNSAPFKEALLREAELRKQRLEELKQQQKLDRQKELEKKRKLETNPDIKPSNVEPMEKEFGLCKTENKAKSGKQNSKKLYCQELKKVIEASDVVLEVLDARDPLGCRCPQVEEAIVQSGQKKLVLILNKSDLVPKENLESWLNYLKKELPTVVFRASTKPKDKGKITKRVKAKKNAAPFRSEVCFGKEGLWKLLGGFQETCSKAIRVGVIGFPNVGKSSIINSLKQEQMCNVGVSMGLTRSMQVVPLDKQITIIDSPSFIVSPLNSSSALALRSPASIEVVKPMEAASAILSQADARQVVLKYTVPGYRNSLEFFTMLAQRRGMHQKGGIPNVEGAAKLLWSEWTGASLAYYCHPPTSWTPPPYFNESIVVDMKSGFNLEELEKNNAQSIRAIKGPHLANSILFQSSGLTNGIIEEKDIHEELPKRKERKQEEREDDKDSDQETVDEEVDENSSGMFAAEETGEALLRRLQQVNSLQGLLSWIKSLKRMMLMTSVQIMCNRTMAFYDFFF

SEQ ID NO: 15834 - protein, 857 aa, Homo sapiens
  DOMAIN (89)..(110): GTP1/OBG GTP-BINDING PROTEIN FAMILY SIGNATURE domain identified by eMATRIX, accession number PR00326A, p-value=5.979e- 14, raw score of 8.75
  DOMAIN (428)..(645): Bromo domain identified by PFam, accession name bromodomain, E-value=1.9e-28, PFam score of 102.7
GQKKLVLILNKSDLVPKENLESWLNYLKKELPTVVFRASTKPKDKGKITKRVKAKKNAAPFRSEVCFGKEGLWKLLGGFQETCSKAIRVGVIGFPNVGKSSIINSLKQEQMCNVGVIHGGLQGSMQVVPLDKQITIIDSPSFIVSPLNSSSALALRSPASIEVVKPMEAASAILFQADVRQVVLKYTVPGLQGILWEFFTMLAQRKEVWHQKGGIPKCLEGAAKLLWSEWTGASLAYYCHPPTSWTPPPYFNESIVVDMKSGFNLEELEKNNAQSIRGENCVSLLSSSADRPVELLPVYMGLLSFPAIKGPHLANSILFQSSGLTNGIIEEKDIHEELPKRKERKQEEREDDKDSDHETVDEEVDKKLDSMGSKRRRATSPSSSVSGDFDDGHHSVSTPGPSRKRRRLSNLPTVDPIAVCHELYNTIRDYKDEQGRLLCELFIRAPKRRTDSEIYEDAVELQQFFIKIRDELCKNGEILLSPALSYTTKHLHNDVEKERKEKLPKEIEEDKLKREEEKRVEGIIQRLHYCTNPDSKPKYPAQRTPQIHLQGEVLFYESKFRTLEEVTVVLDTHIISINQPDYYEVVSQPIDLMKIQQKLKMEEYDDVNLLTADFQLLFNNAKSYYKPDSPEYKAACKLWDLYLRTRNEFVQKGEADDEDDDEDGQDNQGTVTEGLLKISITQKIRPVVILFHYGESWNLLRADQRLIFAKSWPRASRYQQGHQDLFILRSDLPSQVFIRDKLMERRNRRTGRTEKARIWEVTDRTVRTWIGEAVAAAAADGVTFSVPVTPHTFRHSYAMHMLYAGIPLKVLQSLMGHKSISSTEVYTKVFALDVAARHRVQFAMPESDAVAMLKQLS

SEQ ID NO: 15835 - protein, 85 aa, Homo sapiens
  DOMAIN (26)..(51): mutT domain proteins domain identified by eMATRIX, accession number BL00893, p-value=5.364e-17, raw score of 18.99
  DOMAIN (9)..(50): Bacterial  mutT  protein domain identified by PFam, accession name mutT, E-value=4.7e-07, PFam score of 29.9
VFLSEQDEVLLIQEAKRECRGSWYLPAGRMEPGETIVEALYREVKEEAGLHCEPETLLSVEERGPSWVRFVFLARPTGMAHLEAV

SEQ ID NO: 15836 - protein, 85 aa, Homo sapiens
  DOMAIN (24)..(39): WILM'S TUMOUR PROTEIN SIGNATURE domain identified by eMATRIX, accession number PR00049D, p-value=2.357e-10, raw score of 0.00
RTLLVPGLGGQRKPPPFRPGGANGDKAPPPAPTPPGIPRCAAQESLGAAASGQVPWCSRGPAPGPLRSVCRAEGRGRPPYHAPFF

SEQ ID NO: 15837 - protein, 37 aa, Homo sapiens
RSSSSSPSLGLCTCAAGDPPLMFNEDYQKSLLEQYHL

SEQ ID NO: 15838 - protein, 121 aa, Homo sapiens
  DOMAIN (27)..(66): UBA domain identified by PFam, accession name UBA, E-value= 0.00044, PFam score of 27.0
IMKDRWMNVGHEEEELKPYTEPDPDFNDTKRIDIMVTMGFARDEINDALINQKYDEVMATYILLGRKPPEFEGGESLSSGNLCQRSRPSSDLNNSTLQSPAHLKVQRSISANQKQRRFSDH

SEQ ID NO: 15839 - protein, 80 aa, Homo sapiens
EFSDALGYLQLLNSCSDAAGAPAYSFSISSSMATTTGVDPVAKWWASLTAVVIHWLRRDEEAAERLCPLVEHLPRVLQES

SEQ ID NO: 15840 - protein, 112 aa, Homo sapiens
PRVRPRVRPRVRGRVGCSDAAGAPAYSFSISSSMATTTGESPAPVLAPFSAPPCSVTEGSGDPPSSAGVDPVAKWWASLTAVVIHWLRRDEEAAERLCPLVEHLPRVLQESE

SEQ ID NO: 15841 - protein, 60 aa, Homo sapiens
RAFATMGETVMSVKIIRNRLTGIPAGYCFVEFADLATAEKCLHKINGKPLPGATPVRTFR

SEQ ID NO: 15842 - protein, 126 aa, Homo sapiens
CRTLCEGPQRFEEYEYLGYKAGLYEAIADHYMQVLVCQHECVRELATRPGRLSPIENFLPLHYDYLQFAYYRVGEYVKALECAKAYLLCHPDDEDVLDNVDYYESLLDDSIDPASIEAREDLTMFV

SEQ ID NO: 15843 - protein, 171 aa, Homo sapiens
  misc_feature (1)...(171): Xaa = X or * as defined in Table 2
SGRPFFFFFFSATGACLFPPGPGRLGAEYRQRHWGTWVWHGLELGRLGSNREGCARACRDWSHPPRTERGPSGHGGITSARLGTGTGERLRSGCVQGLVGMGRPVDRACXSVLEPGGTPGRANWALDVEKLGNKYXENKSLWVSRPRQRCDCRQDRPWERPRLQVTPIARQ

SEQ ID NO: 15844 - protein, 577 aa, Homo sapiens
LCTRKLGTRKLGPLEGYSRAAAYYSGDYERAVRDLEAALRSHRRLREIRTRCARHCAARHPLPPPPPGEGPGAELPLFRSLLGRARCYRSCETQRLGGPASRHRVSEDVRSDFQRRVPYNYLQRAYIKLNQLEKAVEAAHTFFVANPEHMEMQQNIENYRATAGVEALQLVDREAKPHMESYNAGVKHYEADDFEMAIRHFEQALREYFVEDTECRTLCEGPQRFEEYEYLGYKAGLYEAIADHYMQVLVCQHECVRELATRPGRLSPIENFLPLHYDYLQFAYYRGSGNFKEPNKDCFYVDALLPENRNQILTQILQSANLSANKLFTVGGQIAIYLCKAQELLVGEYVKALECAKAYLLCHPDDEDVLDNVDYYESLLDDSIDPASIEAREDLTMFVKRHKLESELIKSAAEGLGFSYTEPPFKDKVTSARAFLSPMRNVASSTVVESHHTQFRALEVKAQQNERNWQASELPRGNNVEGQKENGLFGSSAHAQHKTLLIYGPQGMPPTLVKMIFFTQSTDSNANLFQKHPHRHNQKCFSSYLGPFKSTSKIDCHTDEKTEIQIFETNYLRPRGD

SEQ ID NO: 15845 - protein, 146 aa, Homo sapiens
LTSSVDLYFGAHHPLHVTMLPNPSHLEAVNPVAVGKTRGRQQSRQDGDYSPDNSAQPGDRVICLQVHGDASFCGQGIVPETFTLSNLPHFKIGGSVHLIVNNQLGYTTPAERGRSSLYCSDIGKLVGCAIIHVNGDSPEEVVRATR

SEQ ID NO: 15846 - protein, 52 aa, Homo sapiens
LSLSAAAAAGRYGGTFQNVSLQLPITLNKFFQPTEMASQDFFQRWKQLSNPQ

SEQ ID NO: 15847 - protein, 933 aa, Homo sapiens
  DOMAIN (653)..(668): WILM'S TUMOUR PROTEIN SIGNATURE domain identified by eMATRIX, accession number PR00049D, p-value=7.864e-09, raw score of 0.00
  DOMAIN (19)..(580): Adaptin N terminal region domain identified by PFam, accession name Adaptin_N, E-value=2.5e-206, PFam score of 698.9
RGLAVFISDIRNCKSKEAEIKRINKELANIRSKFKGDKALDGYSKKKYVCKLLFIFLLGHDIDFGHMEAVNLLSSNRYTEKQIGYLFISVLVNSNSELIRLINNAIKNDLASRNPTFMGLALHCIASVGSREMAEAFAGEIPKVLVAGDTMDSVKQSAALCLLRLYRTSPDLVPMGDWTSRVVHLLNDQHLGVVTAATSLITTLAQKNPEEFKTSVSLAVSRLSRIVTSASTDLQDYTYYFVPAPWLSVKLLRLLQCYPPPDPAVRGRLTECLETILNKAQEPPKSKKVQHSNAKNAVLFEAISLIIHHDSEPNLLVRACNQLGQFLQHRETNLRYLALESMCTLASSEFSHEAVKTHIETVINALKTERDVSVRQRAVDLLYAMCDRSNAPQIVAEMLSYLETADYSIREEIVLKVAILAEKYAVDYTWYVDTILNLIRIAGDYVSEEVWYRVIQIVINRDDVQGYAAKTVFEALQAPACHENLVKVGGYILGEFGNLIAGDPRSSPLIQFHLLHSKFHLCSVPTRALLLSTYIKFVNLFPEVKPTIQDVLRSDSQLRNADVELQQRAVEYLRLSTVASTDILATVLEEMPPFPERESSILAKLKKKKGPSTVTDLEDTKRDRSVDVNGGPEPAPASTSAVSTPSPSADLLGLGAAPPAPAGPPPSSGGSGLLVDVFSDSASVVAPLAPGSEDNFARFVCKNNGVLFENQLLQIGLKSEFRQNLGRMFIFYGNKTSTQFLNFTPTLICSDDLQPNLNLQTKPVDPTVEGGAQVQQVVNIECVSDFTEAPVLNIQVHGSGGTFQNVSLQLPITLNKFFQPTEMASQDFFQRWEGSLSNPQQGSCRNIFSKAKHPMDTEVTKAKIIGFGSALLEEVDPNPANFVGAGIIHTKTTQIGCLVRLEPNLQAQMYRLTLRTSKEAVSQRLCELLSAQF

SEQ ID NO: 15848 - protein, 75 aa, Homo sapiens
ISIPQGYLYCRGLQVPSDLPHHPSALCCCPSPGSIGFSLLTKQTRQVPASGLAWLLAGGWGNSCSTCSLTSFYTC

SEQ ID NO: 15849 - protein, 132 aa, Homo sapiens
  DOMAIN (8)..(49): B-box zinc finger domain identified by PFam, accession name zf-B_box, E-value=0.0019, PFam score of 24.9
SKKRKRQEEKHVCKKHNQVLTFFCQKDLELLCPRCSLSTDHHHHCVWPIKKAASYHRKKLEEYNAPRKERVELTEKVITMQTRKSLELKKKVKHRAEEVKPEFEQLRLFLQNEQETVLRHLQDEQMDILPQL

SEQ ID NO: 15850 - protein, 145 aa, Homo sapiens
  DOMAIN (47)..(93): Dynamin family proteins domain identified by eMATRIX, accession number BL00410C, p-value=1.679e-35, raw score of 13.50
  DOMAIN (1)..(92): Dynamin family domain identified by PFam, accession name dynamin, E-value=1.2e-47, PFam score of 171.7
IASRNVPDLTLIDLPGIPTGAAGNQPADIGDNIKTLIKKLIQRHETIRLAVVPRIVDIAATEALTMAQEVDPEGDRTIEILTKPDLVDKGTDNKAVDVVRNLVLHLKKAHMIVKCRGQQGDPDQMSLPETLPRDKIFFENHPYIK

SEQ ID NO: 15851 - protein, 117 aa, Homo sapiens
NDEQAPAQSLLTPPRPAAIMPLRSVPSASPSPPSASSTGLHAAPQAFPVPTGPRPDRSLELHWPSGKLQAPHYCLQTLVIWTCSPSRLGGGPSPRSGKCLRPSQLWSMHLPFPSHRS

SEQ ID NO: 15852 - protein, 112 aa, Homo sapiens
LKLYPNETIVGNGSPSQTNNGAMLIWIKRKIHFVGTKSYPASVSKVAGKKGTRLHAQRFLVHLERTGGKCHYTMIKGSIHLEYTAIIIIYAPNIRTPKYIKQTLTKLKGEIK

SEQ ID NO: 15853 - protein, 112 aa, Homo sapiens
LLRVYSFMALKMYHQLPTQVSSSTALNLQHQLPTGSPDARPSKWNINSPPRFPAPRPSTCNISSPPGLQMHSPQTGTSTPRRVSRCTACKLEHQLPSGLQLHSPQTATAAAS

SEQ ID NO: 15854 - protein, 23 aa, Homo sapiens
GNYGGGPGYSSRGGYGGGGVDAA

SEQ ID NO: 15855 - protein, 104 aa, Homo sapiens
  DOMAIN (12)..(47): Prion protein domain identified by eMATRIX, accession number BL00291A, p-value=4.414e-09, raw score of 4.49
GRGGFFLGPRGPKKKTPGGEGFTRFFDPGWGKGPEKKTPPPWGGKGGPKKMNLWGAGKIKFLEIKGKSFPRGTTPNFFGPPLFFSPPKTQGPGNFLDFSFKLKN

SEQ ID NO: 15856 - protein, 124 aa, Homo sapiens
  DOMAIN (20)..(35): LIM domain proteins domain identified by eMATRIX, accession number BL00478B, p-value=6.400e-11, raw score of 14.79
  DOMAIN (2)..(57): LIM domain containing proteins domain identified by PFam, accession name LIM, E-value=1.1e-12, PFam score of 49.9
PRCQQPVFFAEKVSSLGKNWHRFCLKCERCHSILSPGGHAEHNGRPYCHKPCYGALFGPRGVNIGGVGSYLYNPPTPSPGCTTPLSPSSFSPPRPRTGLPQGKKSPPHMKTFTGETSLCPGCGE

SEQ ID NO: 15857 - protein, 114 aa, Homo sapiens
RLTVLLPLLLFKVCFRSTTPCTSHPSQLCLPVSPSPPQACLSLTARILPTPTPRQITPPKSLTGTNLGTLPIIRNTLDEAPTRRILAVAAEFSGMCLILLGWWLIIFFKSRISG

SEQ ID NO: 15858 - protein, 105 aa, Homo sapiens
  DOMAIN (36)..(53): BETA HAEMOGLOBIN SIGNATURE domain identified by eMATRIX, accession number PR00814A, p-value=6.813e-13, raw score of 12.94
  DOMAIN (9)..(103): Globin domain identified by PFam, accession name globin, E- value=1.6e-10, PFam score of 41.1
APRPGAMGHFTQDDMATITSLSGQVNVEDPRGETLAWLLFVYPWTHRLFDSFGTLTSASAIMGNSKFKAPGKMVLTSLIDAISHLDDLMGSFYQLIELHCDKLPV

SEQ ID NO: 15859 - protein, 126 aa, Homo sapiens
  DOMAIN (42)..(74): GTP-binding elongation factors proteins domain identified by eMATRIX, accession number BL00301B, p-value=5.500e-31, raw score of 20.09
  DOMAIN (3)..(123): Elongation factor Tu family domain identified by PFam, accession name GTP_EFTU, E-value=1.3e-53, PFam score of 183.3
  misc_feature (1)...(126): Xaa = X or * as defined in Table 2
MGKGSFKYAWVLDKLKADRERGITIDISLGKFETSKYYVTIIDAPGHRDFIKNMITGTSQADCAVLIVAAGVGEFEAGISKNGQTREHALLAYTLGVKQLIGGVTKMDSTEPPFRRKRYEEIVKGX

SEQ ID NO: 15860 - protein, 462 aa, Homo sapiens; identical to SEQ ID NO: 8358
  DOMAIN (113)..(145): GTP-binding elongation factors proteins domain identified by eMATRIX, accession number BL00301B, p-value=7.158e-27, raw score of 20.09
  DOMAIN (28)..(417): Elongation factor Tu family domain identified by PFam, accession name GTP_EFTU, E-value=7.9e-128, PFam score of 433.5

SEQ ID NO: 15861 - protein, 496 aa, Homo sapiens
  DOMAIN (454)..(468): GTP-binding elongation factors proteins domain identified by eMATRIX, accession number BL00301C, p-value=8.200e-15, raw score of 11.73
  DOMAIN (13)..(473): Elongation factor Tu family domain identified by PFam, accession name GTP_EFTU, E-value=1.2e-63, PFam score of 217.1
  misc_feature (1)...(496): Xaa = X or * as defined in Table 2
KLTPLKPKWESVKTHINLAVIGHVDSGKSTTTGHLIYKCGGIDTKNHLKNLTKEAAEMGKGSFKYAWVLDKLKAERERGITIDISLWKFETSKYYVTIIDAPGHRDFIKNMITGTSQAXPGLGGPLFGGCSPLIVAAGVGEFEAGISKNGQTREHALLAYTLGVKQLIVGCXQKWDSTEPTPTAQKKILKEIVKEKVSTFHXRKFGYNPDTVAFVPNFLVWNGDNMLGAQVPNMPWFQGDGKVTRKDGNASGTTLLWRALDCILPPTRPTDQAPLRLPFQDVLPKIGGYLGTWFLVWPEWETGVLRNPGMGVTFAPVNVTTEVKSVEMHHEALSEALPGDNVGFNVKNVSVKDVRRGNVAGDSKNDPPMEAAGFTAQVIILNHPGQISAGYAPVLDCHTAHIACKFAELKEKIDRRSGKKLEDGPKFLKSGDAAIVDMVPGKPMCVESFSDYPPLGRFAVRDMRQTVAVGVIKAVDKKAAGAGKVTKSAQKAQKAK

SEQ ID NO: 15862 - protein, 87 aa, Homo sapiens
AIQPRLVAVSKTKPADMVIEAYGHGQRTFGENYVQELLEKASNPKILSLCPEIKWHFIGHLQKQNVNKLMGKSEFLIKRENIMPRTE

SEQ ID NO: 15863 - protein, 104 aa, Homo sapiens
GTRDLPAIQPRLVAVSKTKPADMVIEAYGHGQRTFGENYVQELLEKASNPKILSLCPEIKWHFIGHLQKQNVNKLMGKIKLNMKTKLFCHCIASTTLCGRESNF

SEQ ID NO: 15864 - protein, 293 aa, Homo sapiens
  misc_feature (1)...(293): Xaa = X or * as defined in Table 2
VGPRGMWRAGSMSAELGVGCALRAVNERVQQAVARRPRGDLPAIQPRLVAVSKTKPADMVIEAYGHGQRTFGENYVQELLEKASNPKILSLCPEIKWHFIGHLQKQNVNKLMAVPNLFMLETVDSVKLADKVNSSWQRKGSPERLKVMGPGFNTSREEIYLFSVSLLEGKHGLPPSETIAIVEHINAKCPNLEFVGLMTLGSFGHDLSQGPNPDFQLLLSLPEETVVKSXRIPADQVELSMGLSADMQHAVEVRSTDVWIRSTVFGEPDYSKKPTPDKCAADVKAPLEVAQEH

SEQ ID NO: 15865 - protein, 49 aa, Homo sapiens
HRPRQQSNTCFNWKCHHSRPAPLRLPAPEPRPPGPTQPDDPPGIQPDLP

SEQ ID NO: 15866 - protein, 43 aa, Homo sapiens
DLSCHSHGEATQKHSEKCKASCTHMFITALFLIAKHWNQPTCL

SEQ ID NO: 15867 - protein, 128 aa, Homo sapiens
PQTVAATTVPTNTSWAPTTTSLGPAKDKPGLRKAAQGGGSTFTSQGGTPDATAASGAPVSPQAAPEPSKRPHHGDPQDGPSHRDSWLTVTPGTSRPLSTSSGVFTAATGPTPAAFDTSVSPPSRGFLR

SEQ ID NO: 15868 - protein, 63 aa, Homo sapiens
QAQNLSPVTPSTSFTVIRNVQFKILDAVVAQEPLHRGAGQIIPTARRVVYSAFLMGARDLGCN

SEQ ID NO: 15869 - protein, 85 aa, Homo sapiens
  DOMAIN (26)..(39): ALPHA HAEMOGLOBIN SIGNATURE domain identified by eMATRIX, accession number PR00612A, p-value=5.800e-14, raw score of 8.64
  DOMAIN (12)..(53): Globin domain identified by PFam, accession name globin, E- value=1e-06, PFam score of 27.9
HEPQTQREPTMVLSPACKTNVKAAWGKVGAHAGEYGAEALERMFLYFRMTRTYLWYFCLCHCCRQAWGPGFNFWTTCDGCQTRRH

SEQ ID NO: 15870 - protein, 1135 aa, Homo sapiens
  DOMAIN (208)..(240): GTP-binding elongation factors proteins domain identified by eMATRIX, accession number BL00301B, p-value=6.400e-18, raw score of 20.09
  DOMAIN (132)..(670): Elongation factor Tu family domain identified by PFam, accession name GTP_EFTU, E-value=3e-96, PFam score of 327.0
  misc_feature (1)...(1135): Xaa = X or * as defined in Table 2
AGESIMDTDLYDEFGNYIGPELDSDEDDDELGRETKDLDEMDDDDDDDDVGDHDDDHPGMEVVLHEDKKYYPTAEEVYGPEVETIVQEEDTQPLTEPIIKPVKTKKFTLMEQTLPVTVYEMDFLADLMDNSELIRNVTLCGHLHHGKTCFVDCLIEQTHPEIRKRYDQDLCYTDILFTEQERGVGIKSTPVTVVLPDTKGKSYLFNIMDTPGHVNFSDEVTAGLRISDGVVLFIDAAEGVMLNTERLIKHAVQERLAVTVCINKIDRLILELKLPPTDAYYKLRHIVDEVNGLISMYSTDENLILSPLLGNVCFSSSQYSICFTLGSFAKIYADTFGDINYQEFAKRLWGDIYFNPKTRKFTKKAPTSSSQRSFVEFILEPLYKILAQVVGDVDTSLPRTLDELGIHLTKEELKLNIRPLLRLVCKKFFGEFTGFVDMCVQHIPSPKVGAKPKIEHTYTGGVDSDLGEAMSDCDPDGPLMCHTTKMYSTDDGVQFHAFGRVLSGTIHAGQPVKVLGENYTLEDEEDSQICTVGRLWISVARYHIEVNRVPAGNWVLIEGVDQPIVKTATITEPRGNEEAQIFRPLKFNTTSVIKIAVEPVNPSELPKMLDGLRKVNKSYPSLTTKVEESGEHVILGTGELYLDCVMHDLRKMYSEIDIKVADPVVTFCETVVETSSLKCFAETPNKKNKITMIAEPLEKGLAEDIENEVVQITWNRKKLGEFFQTKYDWDLLAARSIWAFGPDATGPNILVDDTLPSEVDKALLGSVKDSIVQGFQWGTREGPLCDELIRNVKFKILDAVVAQEPLHRGGGQIIPTARRVVYSAFLMATPRLMEPYYFVEVQAPADCVSAVYTVLARRRGHVTQGCTHPKASPLXTIKAFIPAIDSFGFETDLRTHTQGQAFSLSVFHHWQIVPGDPLDKSIVIRPLEPQPAPHLAREFMIKTRRRKGLSEDVSISKFFDDPMLLELAKQDVVLNYPMSQQLLQASDHTTWGNHLSDSSRNTFTCIVYLRNLTAACKMDDDDDDDDVGDHDDDHPGIALAAYRSPRPLVVACRRAQFFLTREQEDLSRGRRTEGQAPVADVQAQSRSSIDERRGPDHPYGCDHPKMNLKDSLDVAKPADAKNGNSIRLALTVSEA

SEQ ID NO: 15871 - protein, 212 aa, Homo sapiens
  DOMAIN (123)..(178): Speract receptor repeat proteins domain proteins domain identified by eMATRIX, accession number BL00420B, p-value=8.200e- 22, raw score of 22.67
  DOMAIN (17)..(211): Scavenger receptor cysteine-rich domain identified by PFam, accession name SRCR, E-value=6.2e-46, PFam score of 166.0
AVVVICSDASDMELMLVGGFFRCAGKVEVNVQGAVGILCANGWGMNIAEVVCRQLECASAVTVSREPHFTERTLHILMSNSGCTGGEASLWDCIRWEWKQTACHLNMEASLICSAHRQPRLVGADMPCSGRVEVKHAYTWRSVCDSDFSLHAANVLCRELNCGDAISLSVGDHFGKGNGLTWAEKFQCEGSETHLALCPIVQHPEDTCIHSR

SEQ ID NO: 15872 - protein, 94 aa, Homo sapiens
VECPLFCSWEETSESGTGSFLRGPVATEREGGECSFPPALSSCLPGASSRPPFPSLPPPPALSFHSPPPTPSDQVLPIAVPPPTPYLARVDLDL

SEQ ID NO: 15873 - protein, 120 aa, Homo sapiens; identical to SEQ ID NO: 15150
  DOMAIN (93)..(107): GTP-binding elongation factors proteins domain identified by eMATRIX, accession number BL00301C, p-value=8.200e-15, raw score of 11.73
  DOMAIN (1)..(64): Elongation factor Tu family domain identified by PFam, accession name GTP_EFTU, E-value=1.4e-11, PFam score of 41.6

SEQ ID NO: 15874 - protein, 495 aa, Homo sapiens
  DOMAIN (97)..(129): GTP-binding elongation factors proteins domain identified by eMATRIX, accession number BL00301B, p-value=5.500e-31, raw score of 20.09
  DOMAIN (12)..(392): Elongation factor Tu family domain identified by PFam, accession name GTP_EFTU, E-value=5.6e-126, PFam score of 427.2
  misc_feature (1)...(495): Xaa = X or * as defined in Table 2
KLPLKAKMGKEKTHINIVVIGHVDSGKSTTTGHLIYKCGGIDKRTIEKFEKEAAEMGKGSFKYAWVLDKLKAERERGITIDISLWKFETSKYYVTIIDAPGHRDFIKNMITGTSQADCAVLIVAAGVGEFEAGISKNGQTREHALLAYTLGVKQLIVGVNKMDSTEPPYSQKRYEEIVKEVSTYIKKIGYNPDTVAFVPISGWNGDNMLELCSNMPWFKGMKVTRKDGNASGTTLLEALDCILPPTRPTDKPLRLPLQDVYKIGGIGTVPVGRVETGVLKPGMVVTFAPVNVTTEVKSVEMHHEALSEALPGDNVGFNVKKCVVSRMFRRGNVAGDSKNDPPMEAAGFTAQVIILNHPSQKNARHMPLELDCHTAHIACKFAXAXRKRFDRRSGKKLEDGPXNSLKSGXCWPLVDMVPWASPMCVXEASQDYPPLGRFWPFRYMRQTALRLGVNQKQLDKKAAGAGKVHQSLAQKAXKPKWERKRLISTLSSLDT

SEQ ID NO: 15875 - protein, 147 aa, Homo sapiens
  DOMAIN (22)..(55): PROLINE-RICH PROTEIN 3 domain identified by eMATRIX, accession number DM00215, p-value=6.471e-11, raw score of 19.43
ANAALCQHPTGCQTSADLHWTLPPPRHSPPPPPLHILPPPRHRPPPPPLHIIPPPPPPFHSQAQSSLRPLAPLHFSLSEGHGSARPPSTEHHPGQMGAGEAPPPPPLPPPPSQTRKYCRGRPPRRQNPANCSGCARPESLLPPLDPG

SEQ ID NO: 15876 - protein, 112 aa, Homo sapiens
LRLVNISNSFEYQNTGQDKMHVRSYIACELSVDFQWVLVTPHQCPGIVGVSEETSVSAKMMPRAVISWWEERRNRSQRKGDEKHNHESQGIKFGENFGRDFERGALSQPWTY

SEQ ID NO: 15877 - protein, 143 aa, Homo sapiens
FCSMSSQKWSWQAQPLSWRHWSQGPVPSLPAKLLFKGFLPGTAKPACSAFREAAALAFIQDNKTAISEEKGNGSRFLGFPSARLRGRPRAESPRPEPRARPRATQPGPAAPAAHATPPPGPAPAPYLVIRGASGGRGNVRGPK

SEQ ID NO: 15878 - protein, 68 aa, Homo sapiens
AASTTPTRGCHAPSVHTAPTHTAYVYTRPSGASAFASPQQSTVSVPDSNSSSPNHQGDGASQTSGEQI

SEQ ID NO: 15879 - protein, 68 aa, Homo sapiens
AASTTPTRGCHAPSVHTAPTHTAYVNNKPVGASALASPQESTGRVSDSNSSSPNHQGDGASQTSGEQI

SEQ ID NO: 15880 - protein, 219 aa, Homo sapiens
EGKWLAWKHNPLSLFEFVLSSFLVPCDSRPTCCDVCRGRNWSATQPGSYHSLDMTEALQWARYHWRRLIRGATRDDDSGPYNYSSLLACGRKSSQIPKLSGRHRIVVPHIQPFKDEYEKFSGAYVNNRIRTTKYTLLNFVPRNLFEQFHRAANLYFLFLVVLNWVPLVEAFQKEITMLPLVVVLTIIAIKDGLEDYRKYKIDKQINNLITKVYSRKKKK

SEQ ID NO: 15881 - protein, 108 aa, Homo sapiens
  DOMAIN (81)..(96): SH2 DOMAIN SIGNATURE domain identified by eMATRIX, accession number PR00401A, p-value=2.174e-13, raw score of 14.00
  DOMAIN (81)..(108): Src homology domain 2 domain identified by PFam, accession name SH2, E-value=1.1e-07, PFam score of 25.8
TRNDERPAAEYEQPWEWKKEQIVRALSVQFEGAERPSFREETVRQHHRQKSWTQKILKPALSDHSEGEKVDPGLPLEKQPWYHGAISRAEAESRLQPCKEAGYLVRNS

SEQ ID NO: 15882 - protein, 89 aa, Homo sapiens
FPLDSTGSELKQNILSFTGLPPAMQKVMYKGLPPEDKTLREIKVTSGAKIMGGGSPINGVLSVHTPIYSAHLDAKAEKNKKEPLCRQKQ

SEQ ID NO: 15883 - protein, 41 aa, Homo sapiens
QRLPRTPLTGQGTRRLHRSSQTLPVSKVYFKNYVPCRRLQS

SEQ ID NO: 15884 - protein, 164 aa, Homo sapiens
TVTIYSLFLFLFVRNIHKNQCKTISVGVLFYITKLPLDISYKRGGLTGEKRDKLALQSTARNIVFKIDFQHMDPWGKEEGAFDTGRVCDERCSLLVPCPVSGVRGSLCYGLLYFRVKRNKGVSLSTPPPQPHPPPEPAVGCIWTKPAKPCFSLCSGGRLKPDMG

SEQ ID NO: 15885 - protein, 195 aa, Homo sapiens
  misc_feature (1)...(195): Xaa = X or * as defined in Table 2
LFARLPEAIPWRQGKESSAQIRLEPPSRAQGETGFSWLGPDTTHSRFWWWLGLCGEGWAGIPLCFFSPRKYNTPITRDFLGPPLTGQGNKKTNRSSQTLPVIEKPLSLLXKLLPSLREREXLFIGLGVRAPSPGSLLISGLGAQACPQGLPCLCLYPCLRGPGQDFPNQPRPQHPPSPQKPPSSFPHGSYVESLF

SEQ ID NO: 15886 - protein, 192 aa, Homo sapiens
  DOMAIN (26)..(45): HISTIDINE TRIAD FAMILY SIGNATURE domain identified by eMATRIX, accession number PR00332B, p-value=6.108e-09, raw score of 13.62
  DOMAIN (40)..(88): KH domain identified by PFam, accession name KH-domain, E- value=8.4e-16, PFam score of 65.9
GGRSVLPVDPRVRSHFPMTHGNTGLSAGLDASAQTTSHELTIPNDLIGCIIGRQGAKINEIRQMSGAQIKIANPVEGSTDRQVTITGSAASISLAQYLINVSLENAKPSSQAASVTIPDHLSINLSQPSTPSSSFSSTTTPSLATAGTSDAPSSLPNPSSDRPLCLQSAWHETHPFPGSPPPRLLLPATPPL

SEQ ID NO: 15887 - protein, 285 aa, Homo sapiens
  DOMAIN (45)..(97): KH domain identified by PFam, accession name KH-domain, E- value=0.006, PFam score of 23.2
IITLAGPTNAIFKAFAMIIDKLEEDISSSMTNSTAASRPPVTLRLVVPASQCGSLIGKGGCKIKEYTREYRGFRSKVAGDMLPNLTERAITIAGIPQSIIECVKQICVVMLETLSQSPPKGVTIPYRPKPSSSPVILQGGQPYTIQGQYAIPQPDLTKLHQLAMQQSHFPMTHGNTGIQWHLNPASPRGSKAYWAGLDASAQTTSSWNSPFPNGFDWAGIIGAFKGAKINEIRQMSGAQIKIANPVEGSTDRQVTITGSAASISPGVNIIINVRLSSETGGMGSS

SEQ ID NO: 15888 - protein, 124 aa, Homo sapiens
  DOMAIN (51)..(88): Gamma-glutamyltranspeptidase proteins domain identified by eMATRIX, accession number BL00462B, p-value=5.500e-20, raw score of 17.88
HSSGLGGGGVMLVHDIRRNESHLIDFRESAPGALREETLQRSWETKPGLLVGVPGMVKGLHEAHQLYGRLPWSQVLAFAAAVAQDGFNVTHDLARALAEQLPPNMSERFRETFLPFGRPPLPGS

SEQ ID NO: 15889 - protein, 655 aa, Homo sapiens
  DOMAIN (140)..(183): Gamma-glutamyltranspeptidase proteins domain identified by eMATRIX, accession number BL00462A, p-value=6.438e-24, raw score of 20.89
  DOMAIN (154)..(649): Gamma-glutamyltranspeptidase domain identified by PFam, accession name G_glu_transpept, E-value=2.4e-92, PFam score of 320.2
MAAENEASQESALGAYSPVDYMSITSFPRLPEDEPAPAAPLRGRKDEDAFLGDPDTDPDSFLKSARLQRLPSSSSEMGSQDGSPLRETRKDPFSAAAAECSCRQDGLTVIVTACLTFATGVTVALVMQIYFGDPQIFQQGAVVTDAARCTSLGIEVLSKQGSSVDAAVAAALCLGIVAPHSSGLGGGGVMLVHDIRRNESHLIDFRESAPGALREETLQRSWETKVGTLDLLHPLLSGPPRLPWSQVLAFAAAVAQDGFNVTHDLARALAEQLPPNMSERFRETFLPSGRPPLPGSLLHRPDLAEVLDVLGTSGPAAFYAGGNLTLEMVAEAQHAGGVITEEDFSNYSALVEKPVCGVYRGHLVLSPPPPHTGPALISALNILEGFNLTSLVSREQALHWVAETLKIALALASRLGDPVYDSTITESMDDMLSKVEAAYLRGHINDSQAAPAPLLPVYELDGAPTAAQVLIMGPDDFIVAMVSSLNQPFGSGLITPSGILLNSQMLDFSWPNRTANHSAPSLENSVQPGKRPLSFLLPTVVRPAEGLCGTYLALGANGAARGLSGLTQVLLNVLTLNRNLSDSLARGRLHPDLQSNLLQVDSEFTEEEIEFLEARGHHVEKVDVLSWVHGSRRTNNFIIAVKDPRSPDAAGATIL

SEQ ID NO: 15890 - protein, 88 aa, Homo sapiens
DGVLLCHLGTISAHCNLHLPGSSSSPASVSQIAGVTGVHYHVWLNFFLLVETWFCHVGQADTPFLPKKKKKKAWSGVCAFKPRLLGRA

SEQ ID NO: 15891 - protein, 116 aa, Homo sapiens
  DOMAIN (31)..(53): Globins profile domain identified by eMATRIX, accession number BL01033A, p-value=2.929e-17, raw score of 16.94
  DOMAIN (9)..(114): Globin domain identified by PFam, accession name globin, E- value=3.3e-42, PFam score of 151.6
APSPDAMGHFTEEDKATITSLWGKVNVEDAGGETLGRLLVVYPWTQRFFDSFGNLSSASAIMGNPKVKAHGKKVLTSLGDAIKHLDDLKGTFAQLSELHCDKLHVDPENFKLLGIK

SEQ ID NO: 15892 - protein, 151 aa, Homo sapiens
  DOMAIN (34)..(80): Ribosomal protein L2 proteins domain identified by eMATRIX, accession number BL00467A, p-value=4.600e-32, raw score of 28.90
  DOMAIN (18)..(151): Ribosomal Proteins L2 domain identified by PFam, accession name Ribosomal_L2, E-value=7.1e-62, PFam score of 219.0
TGPVAMGRVIRGQRKGAGSVFRAHVKHRKGAARLRAVDFAERHGYIKGIVKDIIHDPGRGAPLAKVVFRDPYRFKKRTELFIAAEGIHTGQFVYCGKKAQLNIGNVLPVGTMPEGTIVCPVISKKVISSANRAVVGVVAGGGRIDKPILKA

SEQ ID NO: 15893 - protein, 267 aa, Homo sapiens
  DOMAIN (34)..(80): Ribosomal protein L2 proteins domain identified by eMATRIX, accession number BL00467A, p-value=4.600e-32, raw score of 28.90
  DOMAIN (18)..(267): Ribosomal Proteins L2 domain identified by PFam, accession name Ribosomal_L2, E-value=8.8e-104, PFam score of 358.2
TGPVAMGRVIRGQRKGAGSVFRAHVKHRKGAARLRAVDFAERHGYIKGIVKDIIHDPGRGAPLAKVVFRDPYRFKKRTELFIAAEGIHTGQFVYCGKKAQLNIGNVLPVGTMPEGTIVCCLGGEAWKTRGKLARASGNYATVISHNPETKKTRVKLPSGSKKVISSANRAVVGVVAGGWPELTNPSLKAGRAYHKYKAKRQRNCWPRIRGVAMNPVEHTFGGGQHPQHIASPPTIRRDAPAGRKVGLIAARRTGRLRGTKTVQEKEN

SEQ ID NO: 15894 - protein, 113 aa, Homo sapiens
SILQKAKAKILEFATPTTKKEAQKFIGLFGYWRHHMPHMGNILQPLRAVTRKRYDFHWGQKESVAFQQAEQAVQLTPDLWPIRNRPVELQVAVLDQHANWSLRQKQGGKRVPL

SEQ ID NO: 15895 - protein, 123 aa, Homo sapiens
  misc_feature (1)...(123): Xaa = X or * as defined in Table 2
RSKSDSAADLPSRRARLSGTGEKASENKGDPVHLXADGGFVPLEDSLCMXFPAWASSPSAALSIGLTVQVAGLQGLPWAPWVVPLGSTGRRSSGELEESEAGYLSTSSTDGLLGSFKEGCSSC

SEQ ID NO: 15896 - protein, 144 aa, Homo sapiens
DTADPPPYIQRLACSALAPPTASPAPLHVPVPGVQGLIQAVLLVLIFVLRKRIKLTVELFQITNKAISSAPFLLFQPLWTFAILIFFWVLWVAVLLSLGTACGRPRCTGSLCSQRPFHQCQRAWLCGWADQQLNHFLIFRRCPS

SEQ ID NO: 15897 - protein, 126 aa, Homo sapiens
HEAYAPRIFFEGSRPPWVTPRSQQDCSEYLRFLLDRLHEEEKILKVQASHKPSEILECSETSLQEVASKAAVLTETPRTSDGEKTLIEKMFGGKLRTHIRCLNCTSTSQKVEAFTDLSLAFWPSSS

SEQ ID NO: 15898 - protein, 77 aa, Homo sapiens
  DOMAIN (9)..(28): Elongation factor Ts proteins domain identified by eMATRIX, accession number BL01126B, p-value=7.387e-19, raw score of 13.15
  DOMAIN (2)..(54): Elongation factor TS domain identified by PFam, accession name EF_TS, E-value=6.7e-16, PFam score of 58.2
GTRQEGNTTVLVEVNCETDFVSRNLKFQLLVQQVALGTMMHCQTLKDQPSAYSKVSLGFVSSVLNLLSSLGLLLFLL

SEQ ID NO: 15899 - protein, 118 aa, Homo sapiens
HEWMHLTQPELQELTSLLTVNSEFVDWRKFLLVTSMPWPIPLEEELLETLQKFKAVDKEQLGTITFEQYMQAGLWFTGDEDIKIPENPLEPLPFNRQEHLIEFFFRLFADYEKDPPQL

SEQ ID NO: 15900 - protein, 124 aa, Homo sapiens
  DOMAIN (4)..(124): Serpins (serine protease inhibitors) domain identified by PFam, accession name serpin, E-value=5.9e-27, PFam score of 93.8
AREGLWKSKFTPENTTKELFYKADGESCSTSMMYQEGKFPYRHMAESTQVLELPFKGDYITMGLILSKPDKILAPVDKELTPKVLPDWLDELEDMMLVVHMPRLLIEDGFSLKDQLPDNGLVHL

SEQ ID NO: 15901 - protein, 160 aa, Homo sapiens
  DOMAIN (15)..(38): SERUM ALBUMIN FAMILY SIGNATURE domain identified by eMATRIX, accession number PR00802G, p-value=4.000e-23, raw score of 14.57
  DOMAIN (1)..(146): Serum albumin family domain identified by PFam, accession name transport_prot, E-value=8e-09, PFam score of 42.7
KFQNALLVRYTKKVPQVSTPTLVEVSRNLGKVGSKCCKHPEAKRMPCAEDYLSVVLNQLCVLHEKTPVSDRVTKCCTESLVNRRPCFSALEVDETYVPKEFNAETFTFHVKHKPKATKEQLKAVMDDFAAFVEKCCKADDKETCFAEEGKKLVAASQAAL

SEQ ID NO: 15902 - protein, 117 aa, Homo sapiens
  DOMAIN (31)..(53): Globins profile domain identified by eMATRIX, accession number BL01033A, p-value=2.929e-17, raw score of 16.94
  DOMAIN (9)..(117): Globin domain identified by PFam, accession name globin, E- value=3e-37, PFam score of 134.3
APSPDAMGHFTEEDKATITSLWGKVNVEDAGGETLGRLLVVYPWTQRFFDSFGNLSSASAIMGNPKVKAHPENFKLLGNVLVTVLAIHFGKEFTPEVQASWQKMVTGVASALSSRYH

SEQ ID NO: 15903 - protein, 144 aa, Homo sapiens
  DOMAIN (19)..(43): SERUM ALBUMIN FAMILY SIGNATURE domain identified by eMATRIX, accession number PR00802F, p-value=9.400e-25, raw score of 15.39
  DOMAIN (1)..(127): Serum albumin family domain identified by PFam, accession name transport_prot, E-value=0.00073, PFam score of -26.0
GMFLYEYARRHPDYSVVLLLRLAKTYETTLEKCCAAADPHECYAKVFDEFKPLVEEPQNLIKQNCELFEPDICTLSEKERQIKKQTALVELVKHKPKATKEQLKAVMDDFAAFVEKCCKADDKETCFAEEGKKLVAASQAALGL

SEQ ID NO: 15904 - protein, 103 aa, Homo sapiens
  DOMAIN (18)..(42): SERUM ALBUMIN FAMILY SIGNATURE domain identified by eMATRIX, accession number PR00802F, p-value=9.400e-25, raw score of 15.39
MFLYEYARRHPDYSVVLLLRLAKTYETTLEKCCAAADPHECYAKVFDEFKLLVEEPQNLIKQAWRVQIPECAISSLHQESTPSVNSNSCRGLKKPRKSGQQML

SEQ ID NO: 15905 - protein, 155 aa, Homo sapiens
  DOMAIN (115)..(138): SERUM ALBUMIN FAMILY SIGNATURE domain identified by eMATRIX, accession number PR00802G, p-value=9.719e-09, raw score of 14.57
  DOMAIN (2)..(146): Serum albumin family domain identified by PFam, accession name transport_prot, E-value=3.9e-06, PFam score of 7.8
  misc_feature (1)...(155): Xaa = X or * as defined in Table 2
MFLYEYARRHPDYSVVLLLRLAKTYDAEDYLSVVLNQLCVLHEKTPVSDRVTKCCTESLVNRRPCFSALEVDETYVPKEFNAETFTFHADICTLSEKERQIKKQTALVELVKHKPKATKEQLKAVXDDFXAFVEKCCKGDXKGELLXRRXVXNLL

SEQ ID NO: 15906 - protein, 202 aa, Homo sapiens
  DOMAIN (67)..(91): SERUM ALBUMIN FAMILY SIGNATURE domain identified by eMATRIX, accession number PR00802F, p-value=9.400e-25, raw score of 15.39
  DOMAIN (33)..(185): Serum albumin family domain identified by PFam, accession name transport_prot, E-value=4.3e-09, PFam score of 43.6
EFSMLEKSHCIAEVENDEMPADLPSLAADFVESKDVCKNYAEAKDVFLGMFLYEYARRHPDYSVVLLLRLAKTYETTLEKCCAAADPHECYAKVFDEFVNRRPCFSALEVDETYVPKEFNAETFTFHADICTLSEKERQIKKQTALVELVKHKPKATKEQLKAVMDDFAAFVEKCCKADDKETCFAEEGKKLVAASQAALGL

SEQ ID NO: 15907 - protein, 345 aa, Homo sapiens
  DOMAIN (86)..(110): SERUM ALBUMIN FAMILY SIGNATURE domain identified by eMATRIX, accession number PR00802F, p-value=9.400e-25, raw score of 15.39
  DOMAIN (1)..(258): Serum albumin family domain identified by PFam, accession name transport_prot, E-value=9.8e-36, PFam score of 132.1
AKYICENQDSISSKLKECCEKPLLEKSHCIAEVENDEMPADLPSLAADFVESKDVCKNYAEAKDVFLGMFLYEYARRHPDYSVVLLLRLAKTYETTLEKCCAAADPHECYAKVFDEFKPLVEEPQNLIKQNCELFEQLGEYKFQNALLVRYTKKVPQVSTPTLVEVSRNLGKVGSKCCKHPEAKRMPCAEDYLSRGPRTSRMFAKTMLRQRMSSWACCLYEYARRHPDYSVVLLLRLAKTYETTLEKCCAAADPHECYAKVFDEFKPLVEEPQNLIKQNCELFEQLGEYKFQNALLVRYTKKVPQVSTPTLVEVSRNLGKVGSKCCKHPEAKRMPCAEDYLSRGP

SEQ ID NO: 15908 - protein, 475 aa, Homo sapiens
  DOMAIN (247)..(299): Serum albumin family proteins domain identified by eMATRIX, accession number BL00212, p-value=1.000e-40, raw score of 30.19
  DOMAIN (28)..(458): Serum albumin family domain identified by PFam, accession name transport_prot, E-value=2.5e-142, PFam score of 486.2
MKWVTFISLLFLFSSAYSRGVFRRDAHKSEVAHRFKDLGEENFKALVLIAFAQYLQQCPFEDHVKLVNEVTEFAKTCVADESAENCDKSLHTLFGDKLCTVATLRETYGEMADCCAKQEPERNECFLQHKDDNPNLPRLVRPEVDVMCTAFHDNEETFLKKYLYEIARRHPYFYAPELLFFAKRYKAAFTECCQAADKAACLLPKLDELRDEGKASSAKQRLKCASLQKFGERAFKAWAVARLSQRFPKAEFAEVSKLVTDLTKVHTECCHGDLLECADDRADLAKYICENQDSISSKLKECCEKPLLEKSHCIAEHRNLGKVGSKCCKHPEAKRMPCAEDYLSVVLNQLCVLHEKTPVSDRVTKCCTESLVNRRPCFSALEVDETYVPKEFNAETFTFHADICTLSEKERQIKKQTALVELVKHKPKATKEQLKAVMDDFAAFVEKCCKADDKETCFAEEGKKLVAASQAALGL

SEQ ID NO: 15909 - protein, 249 aa, Homo sapiens
  DOMAIN (47)..(71): SERUM ALBUMIN FAMILY SIGNATURE domain identified by eMATRIX, accession number PR00802F, p-value=9.471e-24, raw score of 15.39
  DOMAIN (89)..(235): Serum albumin family domain identified by PFam, accession name transport_prot, E-value=1e-16, PFam score of 68.9
ADLPSLAADFVESKDVCKNYAEAKDVFLGMFLYEYARRHPDYSVVLLLRLAKTYETTLEKCCAAAHPHECYAKVFDEFKPLVEEPQNLIKQNCELFEQLGEYKFQNALLVRYTKKVPQVSTPTLVEVSRNLGKVGSKCCKHPEAKRMPVNRRPCFSALEVDETYVPKEFNAETFTFHADICTLSEKERQIKKQTALVELVKHKPKATKEQLKAVMDDFAAFVEKCCKADDKETCFAEEGKKLVAASQAA

SEQ ID NO: 15910 - protein, 505 aa, Homo sapiens
  DOMAIN (418)..(446): PRECURSOR GLYCOPROTEIN SIGNAL CELL domain identified by eMATRIX, accession number PD02576B, p-value=1.667e-22, raw score of 25.43
  DOMAIN (306)..(482): von Willebrand factor type A domain identified by PFam, accession name vwa, E-value=1.2e-48, PFam score of 175.0
MKWVTFISLLFLFSSAYSRGVFRRDAHKSEVAHRFKDLGEENFKALVLIAFAQYLQQCPFEDHVKLVNEVTEFAKTCVADESAENCDKSLHTLFGDKLFVEVSRNLGKVGSKCCKHPEAKRMPCAEDYLSVVLNQLCVLHEKTPVSDRVTKCCTESLVNRRPCFSALEVDETYVPKEFNAETFTFHADICTLSEKERQIKKQTALVELVKHKPKATKEQLKAVMDDFAAFVEKCCKADDKETCFAEEGKKLVAASQAALGLTCEACQEPGGLVVPPTDAPVSPTTLYVEDISEPPLHDFYCSRLLDLVFLLDGSSRLSEAEFEVLKAFVVDMMERLRISQKWVRVAVVEYHDGSHAYIGLKDRKRPSELRRIASQVKYAGSQVASTSEVLKYTLFQIFSKIDRPEASRIALLLMASQEPQRMSRNFVRYVQGLKKKKVIVIPVGIGPHANLKQIRLIEKQAPENKAFVLSSVDELEQQRDEIVSYLCDLAPEAPPPTLPPDMAQV

SEQ ID NO: 15911 - protein, 976 aa, Homo sapiens
  DOMAIN (425)..(477): Serum albumin family proteins domain identified by eMATRIX, accession number BL00212, p-value=1.000e-40, raw score of 30.19
  DOMAIN (206)..(960): Serum albumin family domain identified by PFam, accession name transport_prot, E-value=2.9e-252, PFam score of 851.4
  misc_feature (1)...(976): Xaa = X or * as defined in Table 2
MKWVTFISLLFLFSSAYSRGVFRRTPLGPASSLPQSFLLKCLEQVRKIQGDGAALQEKLCATYKLCHPEELVLLGHSLGIPWAPLSSCPSQALQLAGCLSQLHSGLFLYQGLLQALEGISPELGPTLDTLQLDVADFATTIWQQMEELGMAPALQPTQGAMPAFASAFQRRAGGVLVASHLQSFLEVSYRVLRHLAQPGGGGDAHKSEVAHRFKDLGEENFKALVLIAFAQYLQQCPFEDHVKLVNEVTEFAKTCVADESAENCDKSLHTLFGDKLCTVATLRETYGEMADCCAKQEPERNECFLQHKDDNPNLPRLVRPEVDVMCTAFHDNEETFLKKYLYEIARRHPYFYAPELLFFAKRYKAAFTECCQAADKAACLLPKLDELRDEGKASSAKQRLKCASLQKFGERAFKAWAVARLSQRFPKAEFAEVSKLVTDLTKVHTECCHGDLLECADDRADLAKYICENQDSISSKLKECCEKPLLEKSHCIAEVENDEMPADLPSLAADFVESKDVCKNYAEAKDVFLGMFLYEYARRHPDYSVVLLLRLAKTYETTLEKCCAAADPHECYAKVFDEFKPLVEEPQNLIKQNCELFEQLGEYKFQNALLVRYTKKVPQVSTPTLVEVSRNLGKVGSKCCKHPEAKRMPCAEDYLSVVLNQLCVLHEKTPVSDRVTKCCTESLVENDEMPADLPSLAADFVESKDVCKNYAEAKDVFLGMFLYEYARRHPDYSVVLLLRLAKTYETTLEKCCAAADPHECYAKVFDEFKPLVEEPQNLIKQNCELFEQLGEYKFQNALLVRYTKKVPQVSTPTLVEVSRNLGKVGSKCCKHPEAKRMPCAEDYLSVVLNQLCVLHEKTPVSDRVTKCCTESLVNRRPCFSALEVDETYVPKEFNAETFTFHADICTLSEKERQIKKQTALVELVLCRCRSSXMHAKAVMDDFAAFVEKCCKADDKETCFAEEGKKLVAASQAALGL

SEQ ID NO: 15912 - protein, 1833 aa, Homo sapiens
  DOMAIN (247)..(299): Serum albumin family proteins domain identified by eMATRIX, accession number BL00212, p-value=1.000e-40, raw score of 30.19
  DOMAIN (28)..(1602): Serum albumin family domain identified by PFam, accession name transport_prot, E-value=0, PFam score of 1877.3
MKWVTFISLLFLFSSAYSRGVFRRDAHKSEVAHRFKDLGEENFKALVLIAFAQYLQQCPFEDHVKLVNEVTEFAKTCVADESAENCDKSLHTLFGDKLCTVATLRETYGEMADCCAKQEPGRNECFLQHKDDNPNLPRLVRPEVDVMCTAFHDNEETFLKKYLYEIARRHPYFYAPELLFFAKRYKAAFTECCQAADKAACLLPKLDELRDEGKASSAKQRLKCASLQKFGERAFKAWAVARLSQRFPKAEFAEVSKLVTDLTKVHTECCHGDLLECADDRADLAKYICENQDSISSKLKECCEKPLLEKSHCIAEVENDEMPADLPSLAADFVESKDVCKNYAEAKDVFLGMFLYEYARRHPDYSVVLLLRLAKTYETTLEKCCAAADPHECYAKVFDEFKPLVEEPQNLIKQNCELFEQLGEYKFQNALLVRYTKKYLQQCPFEDHVKLVNEVTEFAKTCVADESAENCDKSLHTLFGDKLCTVATLRETYGEMADCCAKQEPGRNECFLQHKDDNPNLPRLVRPEVDVMCTAFHDNEETFLKKYLYEIARRHPYFYAPELLFFAKRYKAAFTECCQAADKAACLLPKLDELRDEGKASSAKQRLKCASLQKFGERAFKAWAVARLSQRFPKAEFAEVSKLVTDLTKVHTECCHGDLLECADDRADLAKYICENQDSISSKLKECCEKPLLEKSHCIAEVENDEMPADLPSLAADFVESKDVCKNYAEAKDVFLGMFLYEYARRHPDYSVVLLLRLAKTYETTLEKCCAAADPHECYAKVFDEFKPLVEEPQNLIKQNCELFEQLGEYKFQNAAISSLHQEKVSRNLGKVGSKCCKHPEAKRMPCAEDYLSVVLNQLCVLHEKTPSFLLKCLEQVRKIQGDGAALQEKLCATYKLCHPEELVLLGHSLGIPWAPLSSCPSQALQLAGCLSQLHSGLFLYQGLLQALEGISPELGPTLDTLQLDVADFATTIWQQMEELGMAPALQPTQGAMPAFASAFQRRAGGVLVASHLQSFLEVSYRVLRHLAQPGGGGDAHKSEVAHRFKDLGEENFKALVLIAFAQYLQQCPFEDHVKLVNEVTEFAKTCVADESAENCDKSLHTLFGDKLCTVATLRETYGEMADCCAKQEPERNECFLQHKDDNPNLPRLVRPEVDVMCTAFHDNEETFLKKYLYEIARRHPYFYAPELLFFAKRYKAAFTECCQAADKAACLLPKLDELRDEGKASSAKQRLKCASLQKFGERAFKAWAVARLSQRFPKAEFAEVSKLVTDLTKVHTECCHGDLLECADDRADLAKYICENQDSISSKLKECCEKPLLEKSHCIAEVENDEMPADLPSLAADFVESKDVCKNYAEAKDVFLGMFLYEYARRHPDYSVVLLLRLAKTYETTLEKCCAAADPHECYAKVFDEFKPLVEEPQNLIKQNCELFEQLGEYKFQNALLVRYTKKVPQVSTPTLVEVSRNLGKVGSKCCKHPEAKRMPCAEDYLSVVLNQLCVLHEKTPVSDRVTKCCTESLVNRRPCFSALEVDETYVPKEFNAETFTFHADICTLSEKERQIKKQTALVELVKHKPKATKEQLKAVMDDFAAFVEKCCKADDKETCFAEEDAPVSPTTLYVEDISEPPLHDFYCSRLLDLVFLLDGSSRLSEAEFEVLKAFVVDMMERLRISQKWVRVAVVEYHDGSHAYIGLKDRKRPSELRRIASQVKYAGSQVASTSEVLKYTLFQIFSKIDRPEASRIALLLMASQEPQRMSRNFVRYVQGLKKKKVIVIPVGIGPHANLKQIRLIEKQAPENKAFVLSSVDELEQQRDEIVSYLCDLAPEAPPPTLPPDMAQV

SEQ ID NO: 15913 - protein, 149 aa, Homo sapiens
  DOMAIN (95)..(107): Globins profile domain identified by eMATRIX, accession number BL01033B, p-value=1.000e-15, raw score of 13.81
  DOMAIN (9)..(149): Globin domain identified by PFam, accession name globin, E- value=3.5e-55, PFam score of 196.7
APSPDAMGHFTEEDKATITSLWGKVNVEDAGGETLGRLLVVYPWTQSFGNLSSASAIMGNPKVKAHGKKVLTSLGDATKHLDDLKGTFAQLSELHCDKLHVDPENFKLLGNVLVTVLAIHFRKEFTPEVQASWQKMVTAVASALSSRYH

SEQ ID NO: 15914 - protein, 36 aa, Homo sapiens
SFFSQTQASEQLTKSKQGLALRTLPPVQFPPPPPRP

SEQ ID NO: 15915 - protein, 63 aa, Homo sapiens
VGRVGLELLASSDLPTSGSPSAGITGMSHCPWPNFLLIFIGYFFTVLTPCEYYSGGMTVPLWL

SEQ ID NO: 15916 - protein, 122 aa, Homo sapiens
APQIKRHLEVKASPSSLEGESSLSQQPTPLPQTFMAPKRLDKAKEAQRTPSPGGGQPLSPLPHPFTQELFTVPPVMPGHADTLLLKCPYPILRPAPRPPAYRIHPVCQEAIGTLAILSALCS

SEQ ID NO: 15917 - protein, 117 aa, Homo sapiens
  DOMAIN (1)..(43): Kinesin motor domain identified by PFam, accession name kinesin, E-value=4.1e-16, PFam score of 61.6
TLSTLRYADRAKQIKCNAVINEDPNAKLVRELKEEVTRLKDLLRAQGLGDIIDIDPLIDDYSGSGSKYLKDFQNNKHRYLLASENQRPGHFSTASMGSLTSSPSSCSLSSQVGLTSV

SEQ ID NO: 15918 - protein, 137 aa, Homo sapiens
  DOMAIN (87)..(100): PROTEIN ZINC-FINGER METAL-BINDI domain identified by eMATRIX, accession number PD00066, p-value=2.800e-14, raw score of 13.92
  DOMAIN (13)..(119): Zinc finger, C2H2 type domain identified by PFam, accession name zf-C2H2, E-value=2e-25, PFam score of 97.9
HACERIHTGEKPYICFEWGSFFRKHSNLTQHQRIHTGEKPHKCDECGKTFQTKANLSQHQRIHSGEKPYKCKECGKAFCQSPSLIKHQRIHTGEKPYKCKECGKAFTQSTPLTKHQRIHTGERPYKCSECGKAFIQK

SEQ ID NO: 15919 - protein, 69 aa, Homo sapiens
MRQDFEIILFLFVSTLVCCSLVIKRKMWPGAMAYACNPSTLGDRGRQITRSGVQDQPGQYGETSSLLKK

SEQ ID NO: 15920 - protein, 36 aa, Homo sapiens
PTRSGTFKSGVLYKGHGEIPNWADENSVDEAEVCAS

SEQ ID NO: 15921 - protein, 138 aa, Homo sapiens
QLGTRHNISASQVNAWHVAESAVNYSLGDEQGFCGSPWPNCNFPEYFTYSVLLSLLACSVFLQINCIGKLVLMLAIELIYVLIVEVPGVTLFDNADLLVTANAIDFFNNGTSQCPEHATKVALKVVTPIIISVFVLAL

SEQ ID NO: 15922 - protein, 239 aa, Homo sapiens
MHWGVGFASSRPCVVDLSWNQSISFFGWWAGSEEPFSFYGDIIAFPLQDYGGIMAGLGSDPWWKKTLYLTGGALLAAAAYLLHELLVIRKQQEIDSKDAIILHQFARPNNGVPSLSPFCLKMETYLRMADLPYQNYFGGKLSAQGKMPWIEYNHEKVSGTEFIIDFLEEKLGVNLNKNLGPHERAISRAVTKMVEEHFYALSWRWYHPVPTCPLQKFLQFVRQLMLFMRTPSPSALPGH

SEQ ID NO: 15923 - protein, 260 aa, Homo sapiens
SCAACTGGLALLCFRPCVVDLSWNQSISFFGWWAGSEEPFSFYGDIIAFPLQDYGGIMAGLGSDPWWKKTLYLTGGALLAAAAYLLHELLVIRKQQEIDSKDAIILHQFARPNNGVPSLSPFCLKMETYLRMADLPYQNYFGGKLSAQGKMPWIEYNHEKVSGTEFIIDFLEEKLGVNLNKNLGPHERAISRAVTKMVEEHFYCLPAVNLCFWNKVQLPVLRPVLIVPLPAPPASPLTGFLKCSLYPRAPYRSSCSSSGS

SEQ ID NO: 15924 - protein, 130 aa, Homo sapiens
  DOMAIN (31)..(53): Globins profile domain identified by eMATRIX, accession number BL01033A, p-value=2.929e-17, raw score of 16.94
  DOMAIN (9)..(94): Globin domain identified by PFam, accession name globin, E- value=1.1e-29, PFam score of 107.9
APSPDAMGHFTEEDKATITSLWGKVNVEDAGGETLGRLLVVYPWTQRFFDSFGNLSSASAIMGNPKVKAHGKKVLTSLGDATKHLDDLKGTFAQWPVPCPPDTTELTAHDAELSRIGFILQAIQIINLFC

SEQ ID NO: 15925 - protein, 99 aa, Homo sapiens
  DOMAIN (53)..(99): Amyloidogenic glycoprotein extracellular domain proteins domain identified by eMATRIX, accession number BL00319G, p-value= 1.000e-40, raw score of 16.93
FSNAERVGGLEEERESVGPLRQDFSMSSSALIGVLVIAVAIATVIVISLVMLRKRQYGTISHGIVEVDPMLTPEERHVNKMQNHGYENPTYKYLEQMQI

SEQ ID NO: 15926 - protein, 695 aa, Homo sapiens
  DOMAIN (77)..(126): Amyloidogenic glycoprotein extracellular domain proteins domain identified by eMATRIX, accession number BL00319A, p-value= 1.000e-40, raw score of 17.62
  DOMAIN (42)..(204): Amyloid A4 extracellular domain identified by PFam, accession name A4_EXTRA, E-value=5.4e-121, PFam score of 415.4
MAATGTAAAAATGRLLLLLLVGLTAPALALAGYIEALAANAGTGFAVAEPQIAMFCGKLNMHVNIQTGKWEPDPTGTKSCFETKEEVLQYCQEMYPELQITNVMEANQRVSIDNWCRRDKKQCKSRFVTPFKCLVGEFVSDVLLVPEKCQFFHKERMEVCENHQHWHTVVKEACLTQGMTLYSYGMLLPCGVDQFHGTEYVCCPQTKIIGSVSKEEEEEDEEEEEEEDEEEDYDVYKSEFPTEADLEDFTEAAVDEDDEDEEEGEEVVEDRDYYYDTFKGDDYNEENPTEPGSDGTMSDKEITHDVKVPPTPLPTNDVDVYFETSADDNEHARFQKAKEQLEIRHRNRMDRVKKEWEEAELQAKNLPKAERQTLIQHFQAMVKALEKEAASEKQQLVETHLARVEAMLNDRRRMALENYLAALQSDPPRPHRILQALRRYVRAENKDRLHTIRHYQHVLAVDPEKAAQMKSQVMTHLHVIEERRNQSLSLLYKVPYVAQEIQEEIDELLQEQRADMDQFTASISETPVDVRVSSEESEEIPPFHPFHPFPALPENEGSGVGEQDGGLIGAEEKVINSKNKVDENMVIDETLDVKEMIFNAERVGGLEEERESVGPLREDFSLSSSALIGLLVIAVAIATVIVISLVMLRKRQYGTISHGIVEVDPMLTPEERHLNKMQNHGYENPTYKYLEQMQI

SEQ ID NO: 15927 - protein, 669 aa, Homo sapiens
  DOMAIN (39)..(88): Amyloidogenic glycoprotein extracellular domain proteins domain identified by eMATRIX, accession number BL00319A, p-value= 1.000e-40, raw score of 17.62
  DOMAIN (4)..(166): Amyloid A4 extracellular domain identified by PFam, accession name A4_EXTRA, E-value=5.4e-121, PFam score of 415.4
ANAGTGFAVAEPQIAMFCGKLNMHVNIQTGKWEPDPTGTKSCFETKEEVLQYCQEMYPELQITNVMEANQRVSIDNWCRRDKKQCKSRFVTPFKCLVGEFVSDVLLVPEKCQFFHKERMEVCENHQHWHTVVKEACLTQGMTLYSYGMLLPCGVDQFHGTEYVCCPQTKIIGSVSKEEEEEDEEEEEEEDEEEDYDVYKSEFPTEADLEDFTEAAVDEDDEDEEEGEEVVEDRDYYYDTFKGDDYNEENPTEPGSDGTMSDKEITHDVKVPPTPLPTNDVDVYFETSADDNEHARFQKAKEQLEIRHRNRMDRVKKEWEEAELQAKNLPKAERQTLIQHFQAMVKALEKEAASEKQQLVETHLARVEAMLNDRRRMALENYLAALQSDPPRPHRILQALRRYVRAENKDRLHTIRHYQHVLAVDPEKAAQMKSQVMTHLHVIEERRNQSLSLLYKVPYVAQEIQEEIDELLQEQRADMDQFTASISETPVDVRVSSEESEEIPPFHPFHPFPALPENEDTQPELYHPMKKGSGVGEQDGGLIGAEEKVINSKNKVDENMVIDETLDVKEMIFNAERVGGLEEERESVGPLREDFSLSSSALIGLLVIAVAIATVIVISLVMLRKRQYGTISHGIVEVDPMLTPEERHLNKMQNHGYENPTYKYLEQMQI

SEQ ID NO: 15928 - protein, 67 aa, Homo sapiens
  DOMAIN (42)..(67): AMYLOID A4 PROTEIN PRECURSOR SIGNATURE domain identified by eMATRIX, accession number PR00203C, p-value=4.667e-27, raw score of 6.37
LFQVIDETLDVKEMIFNAERVGGLQEERESVGPLREDFSLSSSALIGLLVIAVAIATVIVISLVMLR

SEQ ID NO: 15929 - protein, 525 aa, Homo sapiens
  DOMAIN (89)..(133): Pancreatic trypsin inhibitor (Kunitz) family proteins domain identified by eMATRIX, accession number BL00280, p-value=5.091e-38, raw score of 24.61
  DOMAIN (82)..(132): Kunitz/Bovine pancreatic trypsin inhibito domain identified by PFam, accession name Kunitz_BPTI, E-value=9.9e-30, PFam score of 95.1
EEEDYDVYKSEFPTEADLEDFTEAAVDEDDEDEEEGEEVVEDRDYYYDTFKGDDYNEENPTEPGSDGTMSDKEITHDVKAVCSQEAMTGPCRAVMPRWYFDLSKGKCVRFIYGGCGGNRNNFESEDYCMAVCKAMIPPTPLPTNDVDVYFETSADDNEHARFQKAKEQLEIRHRNRMDRVKKEWEEAELQAKNLPKAERQTLIQHFQAMVKALEKEAASEKQQLVETHLARVEAMLNDRRRMALENYLAALQSDPPRPHRILQALRRYVRAENKDRLHTIRHYQHVLAVDPEKAAQMKSQVMTHLHVIEERRNQSLSLLYKVPYVAQEIQEEIDELLQEQRADMDQFTASISETPVDVRVSSDESEEIPPFHPFHPFPALPENEGSGVGEQDGGLIGAEEKVINSKNKVDEKHGPLNETLDVKEMIFNAERVGGLEEERESVGPLREDFSLSSSALIGLLVIAVAIATVIVISLVMLRKRQYGTISHGIVEVVDPMLTPEERHLNKMQNHGYENPTYKYLEQMQI

SEQ ID NO: 15930 - protein, 590 aa, Homo sapiens
  DOMAIN (317)..(361): Pancreatic trypsin inhibitor (Kunitz) family proteins domain identified by eMATRIX, accession number BL00280, p-value=5.091e-38, raw score of 24.61
  DOMAIN (42)..(204): Amyloid A4 extracellular domain identified by PFam, accession name A4_EXTRA, E-value=5.4e-121, PFam score of 415.4
MAATGTAAAAATGRLLLLLLVGLTAPALALAGYIEALAANAGTGFAVAEPQIAMFCGKLNMHVNIQTGKWEPDPTGTKSCFETKEEVLQYCQEMYPELQITNVMEANQRVSIDNWCRRDKKQCKSRFVTPFKCLVGEFVSDVLLVPEKCQFFHKERMEVCENHQHWHTVVKEACLTQGMTLYSYGMLLPCGVDQFHGTEYVCCPQTKIIGSVSKEEEEEDEEEEEEEDEEEDYDVYKSEFPTEADLEDFTEAAVDEDDEDEEEGEEVVEDRDYYYDTFKGDDYNEENPTEPGSDGTMSDKEITHDVKAVCSQEAMTGPCRAVMPRWYFDLSKGKCVRFIYGGCGGNRNNFESEDYCMAVCKAMIPPTPLPTNDVDVYFETSADDNEHARFQKAKEQLEIRHRNRMDRVKKEWEEAELQAKNLPKAERQTLIQHFQAMVKALEKEAASEKQQLVETHLARVEAMLNDRRRMALENYLAALQSDPPRPHRILQALRRYVRAENKDRLHTIRHYQHVLAVDPEKAAQMKSQVMTHLHVIEERRNQILSLLYKVPYVAQEIQEEIDELLQEQRADMDQFTASISEHPCGRPGEL

SEQ ID NO: 15931 - protein, 74 aa, Homo sapiens
  misc_feature (1)...(74): Xaa = X or * as defined in Table 2
MADANKAEVPGATGGDSPHLQPAEPPGEPRREPHPAEAEKQQPQHSSSSNGVKMENDESAKEEKSDLKEKSTGX

SEQ ID NO: 15932 - protein, 250 aa, Homo sapiens
  DOMAIN (75)..(146): RNA recognition motif. domain identified by PFam, accession name rrm, E-value=9.6e-21, PFam score of 82.3
FLFFEPHPAEARKQQPQHSSSSNGVKMENDESAKEEKSDLKEKSTGSKKANRFHPYSKDKNSGTGEKKGPNRNRVFISNIPYDMKWQAIKDLMREKVGEVTYVELFKDAEGKSRGCGVVEFKDEEFVKKALETMNKYDLSGRRVNIKEDPDGENARRALQRTGTSFQGSHASDVGSGLVNLPPSILNNPNIPPEVISNLQAGRLGSTIFVANLDFKVGWKKLKEVFSIAGTVKAGRYKEDKDGQSRGMGT

SEQ ID NO: 15933 - protein, 115 aa, Homo sapiens
  DOMAIN (5)..(17): OCTAMER-BINDING TRANSCRIPTION FACTOR SIGNATURE domain identified by eMATRIX, accession number PR00029D, p-value=3.382e- 09, raw score of 9.95
MPCDEEPSQLEELADFMEQLTPIEKYALNYLELFHTSIEQEKERTSEDAVMTAVRAWEFWNLKTLQEREARLRLEQEEADLLTYTREDAYSMEYVYEDVDGQTEVMPLWTPPTPP

SEQ ID NO: 15934 - protein, 137 aa, Homo sapiens; identical to SEQ ID NO: 9667
  DOMAIN (107)..(134): Protamine P1 proteins domain identified by eMATRIX, accession number BL00048, p-value=2.238e-09, raw score of 6.39
  misc_feature (1)...(137): Xaa = X or * as defined in Table 2

SEQ ID NO: 15935 - protein, 174 aa, Homo sapiens
  misc_feature (1)...(174): Xaa = X or * as defined in Table 2
RGGCDRDGPFSASSPLAMASLTVKAYLLGKEDAAREIRRFSLCCSTEPEAQAEVAAGPGPCERLLIRVAALFPAVRPGGFQAHYRDEDGDLVAFSSDEELTMAMSYVKDDIFRIYIKETNECLADHRPPDAHERAPRNMVHLNEICDGXNGPVAGTLYMCSFCPYYYLCTPFNV

SEQ ID NO: 15936 - protein, 136 aa, Homo sapiens
  DOMAIN (21)..(43): Globins profile domain identified by eMATRIX, accession number BL01033A, p-value=2.929e-17, raw score of 16.94
  DOMAIN (10)..(136): Globin domain identified by PFam, accession name globin, E- value=1e-46, PFam score of 167.4
APSPDAMGHSLWGKVNVEDAGGETLGRLLVVYPWTQRFFDSFGNLSSASAIMGNPKVKAHGKKVLTSLGDAIKHLDDLKGTFAQLSELHCDKLHVDPENFKLLGNVHFGKEFTPEVQASWQKMVTGVASALSSRYH

SEQ ID NO: 15937 - protein, 657 aa, Homo sapiens; identical to SEQ ID NO: 9670
  misc_feature (1)...(657): Xaa = X or * as defined in Table 2

SEQ ID NO: 15938 - protein, 125 aa, Homo sapiens
  misc_feature (1)...(125): Xaa = X or * as defined in Table 2
TAGFLLPQGLPCKYHLMYGSHLMPNVWRRTTTREPKPLGDAEPNTRSLMWEVKRSSSGPWVFKSNIACHIPIFRITSTSSAYDWPFTHSFXXFSGIIPPCPHGCHQPFSQDMVTFPLCQLPAHLH

SEQ ID NO: 15939 - protein, 318 aa, Homo sapiens
  DOMAIN (255)..(267): RNase H domain identified by eMATRIX, accession number PF00075C, p-value=6.365e-09, raw score of 11.58
  DOMAIN (161)..(316): Reverse transcriptase domain identified by PFam, accession name rvt, E-value=0.0016, PFam score of -19.6
GLSQPKPRKETPIPSDTEEEEPLLQAHPVVCQKIEHEQPLGPQGLGQGPPTVVEHTSYSAYTPTELWELAHPSLHQRLQVSRQLAQGKGDHILTEWLMAAMWTGWNDARELSKTVSKWQSYAELVEDTRDQRPHVELAIHWYPTNVQQVLVLVGTDADYSLVYGKRDKFLGKAAYTDGYRGQSVKMTVDYQELNKVTAPLHAAVLSITDLMDHLTMELGQYHYAVDLANASLSDDIAPESQEQFGFTWEGRQWTFTVLPQGYVHSPTICHGLVATDLATWKFPKGIRLFHYIDDIMLTSDSPADLEAVVPLLQQHLAA

SEQ ID NO: 15940 - protein, 138 aa, Homo sapiens
  DOMAIN (16)..(38): Globins profile domain identified by eMATRIX, accession number BL01033A, p-value=2.929e-17, raw score of 16.94
  DOMAIN (6)..(138): Globin domain identified by PFam, accession name globin, E- value=1.1e-54, PFam score of 195.0
QAACGLWGKVNVEDAGGETLGRLLVVYPWTQRFFDSFGNLSSASAIMGNPKVKAHGKKVLTSLGDAIKHLDDLKGTFAQLSELHCDKLHVDPENFKLLGNVLVTVLAIHFGKEFTPEVQASWQKMVTGVASALSSRYH

SEQ ID NO: 15941 - protein, 188 aa, Homo sapiens
  DOMAIN (86)..(100): ALPHA HAEMOGLOBIN SIGNATURE domain identified by eMATRIX, accession number PR00612D, p-value=2.976e-10, raw score of 9.76
  DOMAIN (9)..(188): Globin domain identified by PFam, accession name globin, E- value=3.8e-70, PFam score of 246.5
APSPDAMGHFTEEDKATITSLWGKVNVEDAGGETLGRLLVVYPWTQRFFDSFGNLSSASAIMGNPKVKAHGKKVLTSLGDAIKHLDDLKGTFAQLSELHCDKLHVDPEVLTSLGDAIKHLDDLKGTFAQLSELHCDKLHVDPENFKLLGNVLVTVLAIHFGKEFTPEVQASWQKMVTGVASALSSRYH

SEQ ID NO: 15942 - protein, 195 aa, Homo sapiens
  DOMAIN (64)..(86): Globins profile domain identified by eMATRIX, accession number BL01033A, p-value=2.929e-17, raw score of 16.94
  DOMAIN (48)..(172): Globin domain identified by PFam, accession name globin, E- value=6.6e-50, PFam score of 178.5
MWKMLEEKPWEGSWLSTHGPRGSLTALATCPLPLPSWATPKSRHMARRATITSLWGKVNVEDAGGETLGRLLVVYPWTQRFFDSFGNLSSASAIMGNPKVKAHGKKVLTSLGDAIKHLDDLKGTFAQLSELHCDKLHVDPENFKLLGNVLVTVLAIHFGKEFTPEVQASWQKMVTGGRRNPGKAPGCLPMDPEVL

SEQ ID NO: 15943 - protein, 236 aa, Homo sapiens
  DOMAIN (31)..(53): Globins profile domain identified by eMATRIX, accession number BL01033A, p-value=2.929e-17, raw score of 16.94
  DOMAIN (9)..(236): Globin domain identified by PFam, accession name globin, E- value=1.1e-36, PFam score of 132.4
  misc_feature (1)...(236): Xaa = X or * as defined in Table 2
APSPDAMGHFTEEDKATITSLWCKVNVEDAGGETLGRLLVVYPWTQRFFDSFGNLSSASAIMGNPKVKAYGKKVLTSLGDAIKHLDDLKGTFAQAXSELHCDKLHVDPENFKLLGKCAGDPFLAIPFSAKEFTPGGCRLPGQKDGXLGVGQCPGPPDTTEAQLPMNAELFKDMALFLQAITNNKSISAKRSNFKLLGNVLVTVLAIHFGKEFTPEVQASWQKMVTGVASALSSRYH

SEQ ID NO: 15944 - protein, 154 aa, Homo sapiens
  DOMAIN (99)..(111): Globins profile domain identified by eMATRIX, accession number BL01033B, p-value=1.000e-15, raw score of 13.81
  DOMAIN (9)..(118): Globin domain identified by PFam, accession name globin, E- value=1.2e-27, PFam score of 100.8
QPQTVSILHLTPEEKSAVTALWGKVNLDEVDVEALGRLLVVYPWTQRLLESFGNLSTPDAVMGNPKVKAHGKKVLGAFSDGLAHLDNLKGTFATLSELHCDKLHVDPENFRLLGQRAWSVLAGPITFGKEFTPPVAGLPIRKLVAGVANALAHK

SEQ ID NO: 15945 - protein, 159 aa, Homo sapiens
  DOMAIN (32)..(54): Globins profile domain identified by eMATRIX, accession number BL01033A, p-value=2.929e-17, raw score of 16.94
  misc_feature (1)...(159): Xaa = X or * as defined in Table 2
APSPRRPWGHFTEEDKATITSLWGKVNVEDAGGETLGRLLVVYPWTQRFFDSFGNLSSASAIMGNPKVKAHGKKVLTSLGDATKHLDDLKGTFAQAXSELHCDKLHVDPENFKLLGNVLVTVLAIPFSAKEFTPEGCRASWAERWVTWSWPVPCSSRYH

SEQ ID NO: 15946 - protein, 65 aa, Homo sapiens
GARLQKAGSGFEAVAGEALRKSEIEYYAMLAKTGVHHYSGNNIELGTACGKYYRVCTLAIIDPGD

SEQ ID NO: 15947 - protein, 69 aa, Homo sapiens
FCYFLKALTTLTLVKEVVTFSLSVTWYRIYLFAHFGSQRKSEIEYYAMLAKTGVHHYSGNNIELGTACG

SEQ ID NO: 15948 - protein, 40 aa, Homo sapiens
MLCWLKLGVHHYSGNNIELGTAMRENTYRVLHTGLFIDPG

SEQ ID NO: 15949 - protein, 80 aa, Homo sapiens
  misc_feature (1)...(80): Xaa = X or * as defined in Table 2
NLPKILGHTQKRLQSTRSWKRMMLSLINLQIIIYNPVIPFVGTIPDHLDFVSXIVIRGPVSSDANYIQYDLXNPNKSLSV

SEQ ID NO: 15950 - protein, 140 aa, Homo sapiens; identical to SEQ ID NO: 8052
  DOMAIN (87)..(99): Globins profile domain identified by eMATRIX, accession number BL01033B, p-value=7.000e-14, raw score of 13.81
  DOMAIN (14)..(140): Globin domain identified by PFam, accession name globin, E- value=1.3e-37, PFam score of 135.6

SEQ ID NO: 15951 - protein, 176 aa, Homo sapiens
  DOMAIN (55)..(77): Globins profile domain identified by eMATRIX, accession number BL01033A, p-value=3.250e-20, raw score of 16.94
  DOMAIN (31)..(80): Globin domain identified by PFam, accession name globin, E- value=3.8e-13, PFam score of 50.3
  misc_feature (1)...(176): Xaa = X or * as defined in Table 2
SVMTPVAPTLKAASKSDSSGPHRLRENPPWCLSPADKTNVKAAWGKVGAHAGEYGAEALERMFLSFPTTKTYFPHFDLSHGSAQVXGATGKKVADALTNAVAHVGRTLPNALSGPEATLHAHKLRGGPGSTFKLLSHLPCLGEPWAAHLPGRVSPLGGCKASLGTNFLGFLLKQPC

SEQ ID NO: 15952 - protein, 108 aa, Homo sapiens
  DOMAIN (76)..(104): kw TRANSCRIPTASE REVERSE II ORF2 domain identified by eMATRIX, accession number DM01354A, p-value=1.730e-13, raw score of 11.77
LREPYTRKETHQNIKPTGRANTQIKKRKNLYVTTTEKPPTTMKNNMRERKEEMLYKNQKSITKMTGISPVISIIILNTNELNLSLKRYRGAERIFLNDPTTCCLQEIH

SEQ ID NO: 15953 - protein, 126 aa, Homo sapiens
  DOMAIN (12)..(53): Ferritin iron-binding regions proteins domain identified by eMATRIX, accession number BL00540A, p-value=8.636e-40, raw score of 15.06
  DOMAIN (20)..(58): Ferritins domain identified by PFam, accession name ferritin, E-value=2.6e-20, PFam score of 71.6
APSCQPTMSSQIRQNYSTDVEAAVNSLVNLYLQASYTYLSLGFYFDRDDVALEGVSHFTSACNGPQLLLRGWWLLRLRRLLQVQKVQMHLLQEELLLLLPPGLCQVCPGLHLQRGVREVQLLCLMS

SEQ ID NO: 15954 - protein, 239 aa, Homo sapiens
  DOMAIN (160)..(215): Ferritin iron-binding regions proteins domain identified by eMATRIX, accession number BL00540B, p-value=1.000e-40, raw score of 18.82
  DOMAIN (77)..(235): Ferritins domain identified by PFam, accession name ferritin, E-value=4.4e-92, PFam score of 312.3
HERGSVSCFNSGWTDHIRGHLFQPPTALRFPLRLQPPGPSSRPSPASGTCQHQFLWLAPSCQPTMSSQIRQNYSTDVEAAVNSLVNLYLQASYTYLSLGFYFDRDDVALEGVSHFFRELAEEKREGYERLLRMQTQRGGRALFQDIKKPAEDEWGKTPDAMKAAMALEKKLNQALLDLHALGSARTDPHLCDFLETHFLDEEVKLIKKMGDHLTNLHRLGGPEAGLGEYLFERLTLKHD

SEQ ID NO: 15955 - protein, 75 aa, Homo sapiens
SGYKLRHSSREWQPPLGPLPSYGSSVFTLLNLATARSSGLCLLRLELSFCSLSTTAVCRCYRPAIDSHPGPPLLF

SEQ ID NO: 15956 - protein, 409 aa, Homo sapiens
  DOMAIN (387)..(404): Zinc finger C2H2 type, domain proteins. domain identified by eMATRIX, accession number BL00028, p-value=6.294e-14, raw score of 16.07
  DOMAIN (77)..(407): Zinc finger, C2H2 type domain identified by PFam, accession name zf-C2H2, E-value=7.9e-92, PFam score of 318.5
ISLPDLNINSMLEQRREPWSGESEVKIAKNSDGRECIKGVNTEMSSSVKTPIFNRNDFDDSSFLPQEQKVHLREKPYECNEHSKVFRVSSSLTKHQVIHTVEKPYKCNSCGKVFSRNSHLAEHCRIHTGEKPYKCNVCGKVFSYNSNFARHQRIHTREKPYECNECGKVFSNNSYLARHQRIHAEEKPYKCNECGKGFSHKSSLANHWRIYTGEKPYKCDECGKAFYRIALLVRHQKIHTGEKPYKCNECGKVFIQNSHLAQHWRIHTGEKPYKCNECGKVFNQLSNLARHRRIHTGEKPYKCNECGKAFSEYSGLSAHLVIHTGEKPYKCSECGKAFRHKLSLTNHQRIHTGERPYKCNECGKVFNRIAHLARHRKIHTGEKPYKCNECGKAFSRISYLAQHWTIHMG

SEQ ID NO: 15957 - protein, 164 aa, Homo sapiens
  DOMAIN (40)..(79): PROTEIN ZINC FINGER ZINC-FINGER METAL-BINDING NU domain identified by eMATRIX, accession number PD01066, p-value=8.313e-37, raw score of 19.43
  DOMAIN (38)..(100): KRAB box domain identified by PFam, accession name KRAB, E- value=2e-34, PFam score of 127.8
GHAAARLTSKESCWDEKAQKRKKRKAYESGMALPQGHLTFRDVAIEFSQAEWKCLDPAQRALYKDVMLENYRNLVSLGISLPDLNINSMLEQRREPWSGESEVKIAKNSDGRECIKGVNTGSSYALGSNAEDKPIKKQLGVSFHLHLSELELFPDDRVINGCNQ

SEQ ID NO: 15958 - protein, 107 aa, Homo sapiens
RSLLAYPLPALSPGCSVVPLLTAHQGSLSNSEKNAPHSVPGAGGLDFYLPSRVCILYRGNCMKNWGGGGRARWLTPVIPALWEAEAGGSRGQEIETILANMVKPRLY

SEQ ID NO: 15959 - protein, 54 aa, Homo sapiens
  misc_feature (1)...(54): Xaa = X or * as defined in Table 2
EETEGQARWLTPVIPTLWEAEAGGSPEVGSSRPAXPPLSAFLYPAFFLRSARFL

SEQ ID NO: 15960 - protein, 87 aa, Homo sapiens
  DOMAIN (6)..(34): !!!! PROTEIN ALU SUBFAMILY WARNING ENTRY NUCLEAR PHOSPHO domain identified by eMATRIX, accession number PD02454B, p-value= 3.041e-09, raw score of 11.61
  misc_feature (1)...(87): Xaa = X or * as defined in Table 2
LITIYYIPENCQPGQHSETSSLLKKIKKLAGCGGTHLXSQLLGRLRREDYLSPGGQICSEPXSYHCTPAWVTGQDPASKKKKKKKKR

SEQ ID NO: 15961 - protein, 91 aa, Homo sapiens
HFKQNRKLQGKCLFKRAGQARWLTPVIPALWEAEAGGSRGQEIETILANTVKPVSTKNAKKISRAWWQAPVVPATREAEAGDWREPRRRTL

SEQ ID NO: 15962 - protein, 157 aa, Homo sapiens
  DOMAIN (65)..(93): !!!! PROTEIN ALU SUBFAMILY WARNING ENTRY NUCLEAR PHOSPHO domain identified by eMATRIX, accession number PD02454B, p-value= 9.775e-13, raw score of 11.61
  misc_feature (1)...(157): Xaa = X or * as defined in Table 2
RSKGRAKIKSRRAGQVQWLMPVIPALWEAKAGGSPEARSLXPAWPIWXNPALHSSLVXXSKALSQKQKKQKKNGHDGQHDETVSLLKIQKSAGAHLXSQLLREAEAGELLEPRRQTLQXAEILPLHSGLGDKSKTPSQKKKKKRSQGQVGVREPQGP

SEQ ID NO: 15963 - protein, 166 aa, Homo sapiens
MPTLASPGALPLASPSPTWALAEKSGGKKPAECPPLLCGRVRAGAHTHTHACTFPKQEAALCQDRMEFRFPEGVLGLQLYGCMMKKGPSVCAGGWERGASSSAHIYLGPKKNPQLAVLSPATPSLGHIPSLPEPTLGGPGKPASTPPSPPAGRPSPSPHGAASKYK

SEQ ID NO: 15964 - protein, 104 aa, Homo sapiens
QNLCLGKGLMALSLGWKAHRNHCGLLLQALRSSGLLLFPCGQCPWRGAGSFLDPEIKAFLEENTEVTSSGSLTPEIQLRLLTPRCKFWWERADLWPHSDPYWAI

SEQ ID NO: 15965 - protein, 116 aa, Homo sapiens
  DOMAIN (21)..(73): Ubiquitin domain proteins domain identified by eMATRIX, accession number BL00299, p-value=2.500e-19, raw score of 28.84
  DOMAIN (8)..(81): Ubiquitin family domain identified by PFam, accession name ubiquitin, E-value=5.5e-12, PFam score of 41.6
DRRSVANMHLSVRGEELHTFEVTGHETVAQIKAHLTSLEGIAPKDQVELLADAPLKDEATLRQSGAEAMTTLEVASRMLGRKAHGSLARAGKVRGHTPKEANQDWKKSMTGRAKRC

SEQ ID NO: 15966 - protein, 267 aa, Homo sapiens
  DOMAIN (208)..(231): MITOCHONDRIAL CARRIER PROTEIN SIGNATURE domain identified by eMATRIX, accession number PR00926F, p-value=2.650e-11, raw score of 17.75
  DOMAIN (11)..(231): Mitochondrial carrier proteins domain identified by PFam, accession name mito_carr, E-value=4.3e-50, PFam score of 174.6
MATWRRDGRLTGGQRLLCAGLAGTLSLSLTAPLELATVLAQVGVVRGHARGPWATGHRVWRAEGLRALWKGNAVACLRLFPCSAVQLAAYRKFVVLFTDDLGHISQWSSIMAGSLAGMVSTIVTYPTDLIKTRLIMQNILEPSYRGLLHAFSTIYQQEGFLALYRGVSLTVVGALPFSAGSLLVYMNLEKIWNGPRDQFSLPQNFANVCLAAAVTQTLSFPFETVKRKMQNIQLFLFIGVSISSNIKPSVSLLLYTPVDFDPITAHK

SEQ ID NO: 15967 - protein, 34 aa, Homo sapiens
WQRMAAVGLIMQNILEPSYRGLLHAFSTIYQQEG

SEQ ID NO: 15968 - protein, 352 aa, Homo sapiens
  DOMAIN (275)..(299): GTP-BINDING SAR1 PROTEIN SIGNATURE domain identified by eMATRIX, accession number PR00328A, p-value=1.593e-12, raw score of 10.62
  DOMAIN (257)..(351): ADP-ribosylation factor family domain identified by PFam, accession name arf, E-value=9e-12, PFam score of 33.3
MEPSNICKLGLLIRPKADDCRVVLAKQEITRLLETLQKQQQQFTEVADHIQLDASIPVTFTKTDEVFLEAQIQNMTTSPMFMEKVSLEPSIMYNVTELNSVSQAGECVSTFGSRAYLQPMDTRQYLYCLKPKNEFAEKAGIIKGVTVIGKLDIVWKTNLGERGRLQTSQLQRMAPGYGDVRLSLEAIPDTVNLEEPFHITCKITNCRYKILNILGFAGRKVSVTNTELCIVLQEQPVAKKYSGVTKEQLTREAEQKSLNRRRDNRVHIGPKMEIRVVTLGLDGAGKTTILFKLKQDEFMQPIPTIAVVFVVDSSHRDRISEAHSELAKLLTEKELRDALLLIFANKQVFAAG

SEQ ID NO: 15969 - protein, 272 aa, Homo sapiens
RCETVLNHFQNMMLSHTVMVCTVDLLEFQPSLKKQYLTWSHTLKEQTNSGNLVMRLTKPTLFTNIPVTCEEKDLPGDLFNQLMRDDPSTVNGAEVLMLGEMLTLPQNFGNIFLGETFSSYISVHNDSNQVVKDILVKADLQTSSQRLNLSASNAAVAELKPDCCIDDVIHHEVKEIGTHILVCAVSYTTQAGEKMYFRKFFKFQVLKPLDVKTKFYNAESDLSSVTDEVFLEAQIQNMTTSPMFMEKVSLEPSIMYNVTELNSVSQAGECVS

SEQ ID NO: 15970 - protein, 137 aa, Homo sapiens
  DOMAIN (83)..(136): Zinc finger, C2H2 type domain identified by PFam, accession name zf-C2H2, E-value=0.014, PFam score of 22.0
HAWQPLRTCESFLPLHSPLQSLHAGGGFGACTCTLTSRRHLTTLVPLRKDPEGALAEGEMGNPLSPHTPVASSGMKHTGEKPFECPRCGRRHFLKENLLQHDARICMSRSEQVFTCSACQVTFRLKKKLRVHRSAHT

SEQ ID NO: 15971 - protein, 118 aa, Homo sapiens
  misc_feature (1)...(118): Xaa = X or * as defined in Table 2
EVLRMAGTGLVAVEVVVDALPDFEEGYEGPGGREAAAALVEDETRRYRPTMNYLSYLTSPDYSAFETDILNNDSERLAARQPIXLLTMKLYYLSSPSCGHYFVLLHVYNCLSLYFPSP

SEQ ID NO: 15972 - protein, 82 aa, Homo sapiens
PQQTSGPPGMASSRAVQVKLELGHRAQVRKKPTVEGFTHDWMVFVRGSEHSDVQHFAEKCCFLLHESGTTLLRVYSHPSYRV

SEQ ID NO: 15973 - protein, 153 aa, Homo sapiens
GEFFHMERASTITYLKGETIGTEPEGKGEGECASTGLVNPRFDFPSKVSFPKYRINKRKQKQNTTLSGTKQNPQILFYYTRHEVKSLSTVSPLDHGRKASTQSLSRNFHSEASEHAEDGALRVPLPSWRPPSGVETVKSRSHMPEDHQPTTHW

SEQ ID NO: 15974 - protein, 265 aa, Homo sapiens
  misc_feature (1)...(265): Xaa = X or * as defined in Table 2
IKENSFIWIRASTITYLKGETIGTEPEGKGEGECASTGLVNPRFDFPSKVSFPKIPVXTSLHITPLAIVCPFQNIWSLHGKGQRGKGQNINKRETKNKNTTLFREPKQNPQIPFFXTTQGHEVKSLSTSVPLXITGRKASTQSLXQEFSTLEASEHAEDGALLRVPLPSWRAPSGVGTVKSRFSHVPRDHQPTTHWWPWWSMAGRQRPSPTLSHFLSWMTSCLGPSHFRRELAFWKPTFPIHHRTRQSAHILVPLVFKGHFQQTL

SEQ ID NO: 15975 - protein, 130 aa, Homo sapiens
ESPEAGTGSWLGRTRNQGINTLADHRHRETDFGGSPWIIIIIEFLGRYKFTILFCTIYLWEPFLKTIFWSRNGHDRSRDVQQRAMRSNRCLQEGIKIGPEDICTLWKQAETKVQAKIRKMKVTKKVNHHY

SEQ ID NO: 15976 - protein, 73 aa, Homo sapiens
WWSLETRMRTDRVPMKPSWTRTPSFARALKTSTHSWGPLIARVILRVATTARGYRAMIRAKFRSILPANAIGH

SEQ ID NO: 15977 - protein, 132 aa, Homo sapiens
  DOMAIN (42)..(55): EF-hand calcium-binding domain proteins domain identified by eMATRIX, accession number BL00018, p-value=3.348e-09, raw score of 7.41
  DOMAIN (33)..(61): EF hand domain identified by PFam, accession name efhand, E- value=1.6e-06, PFam score of 35.1
WDLSTMEPKKAMKRAGGANSNGVSMFEQTQIQEFKEAFTIMDQNRDGFIDLNDLRDTFAALGRGNVDNEEIDEMIKDAPGPNNFTAILTMFGEKLMGADPEETILNAFKVFDPVLKRELKADYLRKMLTTQA

SEQ ID NO: 15978 - protein, 197 aa, Homo sapiens
  DOMAIN (62)..(75): EF-hand calcium-binding domain proteins domain identified by eMATRIX, accession number BL00018, p-value=4.522e-09, raw score of 7.41
LARNPGSTHASGGILLGRQCWVLFTMAPKKAKKRAGGANSNVFSMFEQTQIQEFKEAFTIMDQNRDGFIDKNDLRDTFACPWRKLNVKNEEIDEMIKEAPGPINFTVFLTMFWGRNLKGADPEGKPFLNRISKVFDPEGKGVAEGLDYVREMLNNAGRRGFPRKEVDQMFAAFPPDVTGNLDYKNLVHIITHGEEKD

SEQ ID NO: 15979 - protein, 93 aa, Homo sapiens
  DOMAIN (31)..(46): WILM'S TUMOUR PROTEIN SIGNATURE domain identified by eMATRIX, accession number PR00049D, p-value=3.286e-10, raw score of 0.00
ERNPPRGGGGGFPRGALFFFSPPFLRGGFSGGPPKPRAPPPPPFLKGGPPPGGPGGVAPLFFPPCPGGGGGFLKIKPPPPSGPPPNKPFFLGG

SEQ ID NO: 15980 - protein, 62 aa, Homo sapiens
  misc_feature (1)...(62): Xaa = X or * as defined in Table 2
MAXPXGPXLFYSPXLXXXQXGFXPXWAXXGXPPXLQXXQGXAXXGXQXFPVSXXERKTPLGP

SEQ ID NO: 15981 - protein, 139 aa, Homo sapiens
  misc_feature (1)...(139): Xaa = X or * as defined in Table 2
SFSPAWPSRWCASSSWCTDCLVPSTCAALQHPVVFLDKGNHFLIFFYFFFFVILYTSSSHEVEDXPCVMFSKIKWYLLEVRYILVVAYRLSFCKERKKTIKLCQIILLCLAARTWLPCLSLSLPPFLSFSLCMDFFEKK

SEQ ID NO: 15982 - protein, 90 aa, Homo sapiens
  misc_feature (1)...(90): Xaa = X or * as defined in Table 2
VGNMSGTNLDGNDEFDEQLRMLELYGDGKDGDTLTDAGGEPDSLGQYSTDTPTEWDLDIXAWFFMISEYFLFTYLVQFMAFLLYCGFMFL

SEQ ID NO: 15983 - protein, 83 aa, Homo sapiens
GFTMLARLVSELLTAGDPSSLGSQSAGITGMSHHAQPSMHFFYFFFETEFRTSCPGWSTMVRSWLTATSTSWVQALLQPQPPE

SEQ ID NO: 15984 - protein, 206 aa, Homo sapiens
GQRRYSGERDEGRDPLCKDEPQGASSEAPLLVLLFSRGVMMLHQGSCSPSCQSRQGGKAANIWSTSSLENLSAWVVSISRTVISLQHPFAFRVKHFECVENGFLRVRSLKFLPKHCEEHCKVNWTRSLLDHFINFFIFHVHSPKGSKGVSQIVLVNEAIPVLVHDSEGLLKFLDLGLFEHGEHVGVGAPGSLLCFLRCHGGKDPAL

SEQ ID NO: 15985 - protein, 41 aa, Homo sapiens
  DOMAIN (8)..(30): TRANSFORMING PROTEIN P21 RAS SIGNATURE domain identified by eMATRIX, accession number PR00449A, p-value=2.350e-18, raw score of 13.20
TDHIMREYKLVVLGSGGVGKSALTVQFVHVISVVLYYLLIL

SEQ ID NO: 15986 - protein, 334 aa, Homo sapiens
MKRPDVGVLLDNAAEAQLDSHMKPKHGRNPLSSLMRKACSRGKAMTEQCMEVRIMNFCSRTIAGINQESQENPQRSEGSRLLLQDPGDTPNTGSLRKAARGTGKGHCRRKPPAEVCNNLNRQRISWPELGGGHESSVQTSQEATSLGKEGEYYIKGTPCGTKESEQQPSALDLPSDKAYPNEKEPENQLCSPAMDPNQEEIPDLSEKEFRLVNKLIREAPEKVIAINTKRTYINNFLKEQLIINHSKGLGATNTTCGQAVFQIMACFGLKVGSEKAGTGRADFFPLALHESYFRVGVGCLALAKSDTPAMGARETAYGDQPFETLRRLGEEHRT

SEQ ID NO: 15987 - protein, 76 aa, Homo sapiens
  misc_feature (1)...(76): Xaa = X or * as defined in Table 2
RLLFRFFCPTGCSLDVVLSLFSXGCGFLXSLHTGFMPSPEFWPGDSLSVQIVTNFSWRFSSAVAFSSASGSFPQGS

SEQ ID NO: 15988 - protein, 44 aa, Homo sapiens
GLPNHASHTACRFSSSFATLKTATLTSPLPLPPQPTQHEDTQIR

SEQ ID NO: 15989 - protein, 188 aa, Homo sapiens
  DOMAIN (35)..(78): kw TRANSCRIPTASE REVERSE II ORF2 domain identified by eMATRIX, accession number DM01354T, p-value=9.471e-39, raw score of 9.48
  DOMAIN (1)..(158): Reverse transcriptase domain identified by PFam, accession name rvt, E-value=0.01, PFam score of -30.9
YDKTRLFNTVPLPPPHKKIIKKIIQDIKGEILRAFPLRTGTKHRCPLSPLLFNILLEVLARAIRQEKEIKSIQIGKEEVKLSLFADDIIIYLESPKYSSRKLQELIKEFSKVSRYEINVHKSVALLYTNSNQAENQIKKSTPFTIAAKNKIKYLGIYLTKDAKDGYKENYKTLMKEIIDDKNKQKYIP

SEQ ID NO: 15990 - protein, 49 aa, Homo sapiens
LGVLAQLGKNGGLWSQAMEFQTMQAQALLCLPRWLGSSLPPLVCLAPQA

SEQ ID NO: 15991 - protein, 146 aa, Homo sapiens
CCLSWTFHIVKQHVGLLCLGSLSQGATIGVDFMIKTVEINGEKVKEKGGEYHIKGTSCGTKESEQQPSALDLASLTEPTQIRRNQKTNSGNMTKQGSLTPPKKITLAHQQWIQTNKKSLIYLKKNSARHQRKAKPDARKSKKQYEK

SEQ ID NO: 15992 - protein, 516 aa, Homo sapiens
  DOMAIN (248)..(286): Sulfotransferase proteins domain identified by eMATRIX, accession number PF00685D, p-value=8.080e-09, raw score of 24.52
MLPERVPDPDPKKGFWDLVEERIQGESISCRKRIQRASVEAGGYCKVQSKDDEGQRRGGKGGNGEKLSDSALLPRLEKLSDIRKKPPRYPLHRACSVLRPGFDCGTPASGPLRASGVRVPLNRAGSLLGNRAARAGAALRWLSPEPARRGRGGQSRTGGCRARVVVVFEEERFGLSRRHPRFQILEEVPGEMDARRKHWKENMFTPFFSAQDVLEETSEPESSSEQTTADSSKGMEEIYNLSSRKFQEESKFKRKKYIFQLNEIEQEQNLRENKRNISKNETDTNSASYESSNVDVTTEESFNSTEDNSTCSTDNLPALLRQDIRKKFMERMSPKLCLNLLNEELEELNMKYRKIEEEFENAEKELLHYKKEIFTKPLNFQETETDASKSDYELQALRNDLSEKATNVKNLSEQLQQAKEVIHKLNLENRNLKEAVRKLKHQTEVGNVLLKEEMKSYYELEMAKIRGELSVIKNELRTEKTLQARNNRALELLRKYYASSMVTSSSILDHFTGDFF

SEQ ID NO: 15993 - protein, 82 aa, Homo sapiens
  DOMAIN (5)..(33): !!!! PROTEIN ALU SUBFAMILY WARNING ENTRY NUCLEAR PHOSPHO domain identified by eMATRIX, accession number PD02454B, p-value= 9.491e-23, raw score of 11.61
  misc_feature (1)...(82): Xaa = X or * as defined in Table 2
ASHLRSGVRDQPEQHGETPTLLKIQKSPGCGGRHLXSQLPGRLRQENHLNLGGGGCGELRSHHCIPAWVTETLTKKKKKKRR

SEQ ID NO: 15994 - protein, 689 aa, Homo sapiens
  misc_feature (1)...(689): Xaa = X or * as defined in Table 2
DRRERCHPFKRALMPLRPAEPRPAFPIHHPLLPQDANEAPGCWAEAVQGCPTAEDPPCVSRAAPGGSVPPFCPGRLLXGWGGPRGKGDPEGLADSGPPCELRFEEESRPPRVVGESPAEKLAYPPGPLCFFXPFSEFPELXTKSPSXEMTNHMLHSGGGGSWPGSPTSPGPPPGGSLPRAAALPPKTPGQTRAPAGAGCPHADLAMSPGPTPGSPPVAPTSLVADCSSQNVXHPRVPEPTQAATPVQFPKNVITSPGCQSPPKQPAPVPVPRMYNMPRVTEPAQAATPESLGHVPELRSTQTVATASPGHLTPMKGTLGSAREIPEVGTGPPWCPVPPPSPLPLCPAPRGSAGGLTLPLRASQTSGSTFLLISFPFCKLTSPFPGLGVQGTPAGGRSVCTVVQGVVSERGGTSVGQLLHLPVPLCPPLSKGQVMAPIAGLPIQCSGPPVQWGDPRPTPPXCIQPGQVYCCDVLPALLCRFPGAAQPRTPHEWACPALAECLPCALRQVPRAGQPGXTMCGAGTGPGCWKGGQKEAGGRCEKLPTPPLNTTALPAPAGPCSQLPLSHGWPGLPPSPHXDSRQGGPDPASPSQPWLRKPPNPTMGLRKPRKXLLPASPKRLRKPKAASLPVRHPKASLGCSXEGLIWALPXGWPCRWGPLGALGGTWQPPRHPGPVLISRAXGLQPQPLTK

SEQ ID NO: 15995 - protein, 41 aa, Homo sapiens
  misc_feature (1)...(41): Xaa = X or * as defined in Table 2
VLCQFSKGMLPVFAQSVXYWLWVRYVPSIPSLLRVFSMKGC

SEQ ID NO: 15996 - protein, 641 aa, Homo sapiens
  DOMAIN (421)..(455): Glutamate 5-kinase proteins domain identified by eMATRIX, accession number BL00902C, p-value=3.903e-29, raw score of 18.87
  DOMAIN (551)..(625): PUA domain identified by PFam, accession name PUA, E-value= 7.5e-25, PFam score of 96.0
  misc_feature (1)...(641): Xaa = X or * as defined in Table 2
MFSDSLTPMHKERIVTLLKREGHVVGFMGDGINDAPALRAADIGISVDGAVDIAREAADIILLEKSLMVLEEGVIEGRRTFANMLKYIKMTASSNFGNVFSVLVASAFLPFLPMLPLHLLIQNLLYDVSQVAIPFDNVDDEQIQKPQRWNPADLGRFMIFFGPISSIFDILTFCLMWWVFHANTPETQTLFQSGWFVVGLLSQTLIVHMIRTRRVPFIQSCASWPLMIMTVIVMIVGIALPFSPLASYLQLQALPLSYFPWLVAILAGLATNSDRFDLNLHVFRQTGNFNARTCREGGVVFGEEGFASGFDDRFYVIQRLTCLCSDVCRYFARFRIYRDLTGGDDHIAQINXLYVRPIAAGPAPGTFRLWHSRRAMLLTRADMEDRERFLNARDTLRALLDNNIVPVINENDAVATAEIKVGDNDNLSALAAILAGADKLLLLTDQKGLYTADPRSNPQAELIKDVYGIDDALRAIAGDSVSGLGTGGMSTKLQAADVACRAGIDTIIAAGSKPGVIGDVMEGISVGTLFHAQATPLENRKRWIFGAPPAGEITVDEGATAAILERGSSLLPKGIKSVTGNFSRGEVIRICNLEGRDIAHGVSRYNSDALRRIAGHHSQEIDAILGYEYGPVAVTVMHDYR

SEQ ID NO: 15997 - protein, 534 aa, Homo sapiens
  DOMAIN (143)..(188): kw TRANSCRIPTASE REVERSE II ORF2 domain identified by eMATRIX, accession number DM01354N, p-value=1.000e-40, raw score of 13.17
  DOMAIN (227)..(502): Reverse transcriptase domain identified by PFam, accession name rvt, E-value=4.8e-77, PFam score of 269.4
MFFETNENKDTTYQNLWDTFKAVRRGKFIALNAHKRKQKRSKIDTLTSQLKELEKQEQTHSKAYRSLEITKIRAELEEIVKQKTIQKINESRSWFFENINKIDRPLARLINKKRDKNQIDAIKNDKENITTNPTEIQTTIREYYKHLYANKPENLEEMDKFLDTYTLPRLNQEEAESLNRPITGSEIEAIINSLPTKKSPGPDGFTAEFYQRYKKELVPFLLKLFQSIEKEGILPNSFYEASIILIPKPDRDTTKKENFRPISSMNIDAKILNKTLTNQIQQYIKKLIHHDQVGFIPGMQGWFNIHKSINVIQHINRTKDKNHTIISIDAEKAFDKIQQPFMLKTLNKLGIDGTYLKIMTAIYDKPTASTILNGQKLEAFPLKTGTRQGCPLSPLLFNIVLEVLARAIRQEKEIKGIQLGKEEVKLSLFADDMIVYLENPIVSAQTLLKLISNFSKISGYKINVQKSQVFPYTNNRQTESQIMSELLFTIASKRIKYVGIQLTRDVKDLFKENYKPLLKEIKEDTNKWKDILCS

SEQ ID NO: 15998 - protein, 324 aa, Homo sapiens
  DOMAIN (243)..(277): Glutamate 5-kinase proteins domain identified by eMATRIX, accession number BL00902C, p-value=3.903e-29, raw score of 18.87
  DOMAIN (133)..(294): Amino acid kinase family domain identified by PFam, accession name aakinase, E-value=1.1e-25, PFam score of 98.7
MPWADKRNPSGAQSLNGYAPPDLIWGPSHRAFRAQVEYSIGISSIYNSGTHTLPILNQEDFESLNRPITGSEIEAIINSLPSKKSTGPDRFTAEFYQKYNKELPLWDIFAKICSIPHPSYHEEQLAEYIVGWAKEKGFHVERDQVVFQALIHLVKGNMGTGILGLPHRCEERGHPGQSRLIQLWEQLFSIYGIHVGQMLLTRADMEDRERFLNARDTLRALLDNNIVPVINENDAVATAEIKVGDNDNLSALAAILAGADKLLLLTDQKGLYTADPRSNPQAELIKDVYGIDDALRAIAGDSVSGLGTGGMSTKLQAADVFRAQ

SEQ ID NO: 15999 - protein, 26 aa, Homo sapiens
SHFSCYQQNDSPYQGGVFFLTIHFPT

SEQ ID NO: 16000 - protein, 99 aa, Homo sapiens
  misc_feature (1)...(99): Xaa = X or * as defined in Table 2
QCPPQPRPPGRCPTPQSGHTGCSTGGXGLNPLYYNLCDRSGAWGIVLEAVAGAGIVTTFVLTIILVASLPFVQDTKKRSLLGTQLRGRCHHTAGTMGSC

SEQ ID NO: 16001 - protein, 23 aa, Homo sapiens
SWQEAGARSSGPSPNPTASPRHR

SEQ ID NO: 16002 - protein, 54 aa, Homo sapiens
AWEGAHVFTTSPSSCHSWVRDYARVGLPPLPLPCPQRALLGLWEVWKGAYSPAI

SEQ ID NO: 16003 - protein, 118 aa, Homo sapiens
  DOMAIN (46)..(59): LUTEOVIRUS ORF6 PROTEIN SIGNATURE domain identified by eMATRIX, accession number PR00910A, p-value=1.964e-09, raw score of 2.51
  misc_feature (1)...(118): Xaa = X or * as defined in Table 2
GVGGDTHDTHPNTGREGGPSRSGAHVAGPARGRRSLESPLPGARSSGPSPNPTASPSPPLTQSHTXGFPKRPESSCRLSRGVAAWWLWAEYIVFKPAGSSWHCPSPWLLAVARGRMMS

SEQ ID NO: 16004 - protein, 52 aa, Homo sapiens
TKTWTLKKHFVGYPTNSDFELKTAELPPLKNGRVAAKRLKEGDTMMGQQVAK

SEQ ID NO: 16005 - protein, 250 aa, Homo sapiens
  misc_feature (1)...(250): Xaa = X or * as defined in Table 2
SPLLGGLRQKIFFNWEGGGSIKPKLTPSPPARGQGGGPFSSSSPSSSSPESXLFPALRTPSRQGGSAIPSASGLSTPACVPSGSTRNLFHAPHVGRVSLLLPASXKAAGPSKKGPGQVNPAXFRKPGVGIXRSVGPRQLPLEXLHARKNRAGPVPLPGLGKEGPSLQGPKRTQLASLLMEGPPTHPTIHDGTTAQPELWPCRGPQMQSWGSGPEHTFGPRQPHPPHPSSRHRSDSESSSLLQASAHPGKA

SEQ ID NO: 16006 - protein, 160 aa, Homo sapiens
VRLREDDRRGPSLGTCHKSDPGRPAAQSQPPSPGSGTFGLLSFRMVRTKTWTLKKHFVGYPTNSDFELKTAELPPLKNGEVLLEALFLTVDPYMRVVESKNVALPKGTIVLASPGWTTHSISDGKDLEKLLTEWPDTIPLSLALATVGMPGLTAYFGLLE

SEQ ID NO: 16007 - protein, 382 aa, Homo sapiens
  DOMAIN (324)..(368): Quinone oxidoreductase / zeta-crystallin proteins domain identified by eMATRIX, accession number BL01162C, p-value=1.500e- 16, raw score of 22.80
MLLCQKAPSLKTTYNHPPAADSAGTALNLETTVKQTRETQLEYNNVGTDLSPEPKSFNYPLLSSSGDQFEIQLNQQLWSLIPNNDVRRLVSHVIRTLKTDCTETHLQLACAKLISRTGLLMKLLSEQQELRTVSMTAWKPRMNRKSRSRMRQSHFASHAGRWWHNHSTLQPQSPKLQMAELSEARRRSFRMVRTKTWTLKKHFVGYPTNSDFELKTAELPPLKNGGLEFLIAYGMLYFVEVLLEALFLTVDPYMRVAAKRLKEGDTMMGQQVAKVVESKNVALPKGTIVLASPGWTTHSISDGKDLEKLLTEWPDTIPLSLALGTVGMPGLTAYFGLLEICGVKGGETVMVNAAAGAVGSVVGQIAKLKGCKVVGAVGSDEK

SEQ ID NO: 16008 - protein, 109 aa, Homo sapiens
ASGWVRTKTWTLKKHFVGYPTNSDFELKTSELPPLKNGEVLLEALFLTVDPYMRVAAKRLKEGDTMMGQPVAQVIISICPQCLENMSPLYLLLGPVSVHCSYNLFSLCC

SEQ ID NO: 16009 - protein, 63 aa, Homo sapiens
  DOMAIN (44)..(62): PROSTAGLANDIN D RECEPTOR SIGNATURE domain identified by eMATRIX, accession number PR00854B, p-value=6.159e-09, raw score of 7.30
TDQQNEVTLGSHEVTLQPKHVNIHTHDTIYPLFGFFFETQSRSLSQPGLQWRNHGPLQPPPPE

SEQ ID NO: 16010 - protein, 637 aa, Homo sapiens
  DOMAIN (500)..(543): kw TRANSCRIPTASE REVERSE II ORF2 domain identified by eMATRIX, accession number DM01354T, p-value=9.816e-40, raw score of 9.48
  DOMAIN (383)..(618): Reverse transcriptase domain identified by PFam, accession name rvt, E-value=8.2e-14, PFam score of 59.3
MGRKQSRKAENSKNQSASSSKDCSSLPATEQSWTENDFDELTEVGFRRSVITNFSELKMYVRTHCKEAKNLEKRSTQFIKQVLRDLQRDLDSHTIIMGDFNTPLSILERSTTQKVNNDTQELNSALHQVDLIDIYRTLHPKSTEYTFFLAPHHTYSKIDHIVRSKALFSKCKRTEITTNCLSDHSAIKLELRIKKLTQNHTTTWKLNNLLLNDYWVNNEMRAEIKMFFETNENKDTMYQNLWDTFKAVCRGKFIALNAHKRKQERSKIDNLTSQLKELEMQEQTHSKASRRQETTKIRAELKEIETQKTLQKITESRSWCFEKINKIDRLLARLIMKKREKNQIDTIKNDKGDITTDPTEIQTTISGYYKHLSTNKLENLEEMDKLLDTYTLPRLYQEQVESLNTPITGPEIEAIVNSPPTKKIPVSDEFTAEFYQRTNDKNHMIISIDAEKAFDESQQHFMLKTLNKLGIHGTHLKILRAVYDKPTANIILNGQKLEAFPLKTRTREGCPPSPLLFNIVLEVLTRAIRQEKEIKGIQLGKEEVKLSLFADDVIVYLENPIVSAQKLLKLISNFSKVSGLRVLANVYGSFQDMETQGLRFFGQNSVPQQLRPYNGASLQTLESGEKASAPAKDHCLV

SEQ ID NO: 16011 - protein, 459 aa, Homo sapiens
  misc_feature (1)...(459): Xaa = X or * as defined in Table 2
KTPFVGYQHQRPKVDKTTKMGRNQSRKAENSKNQSTSSPPKDRSSLPATEQSWTENDFDELTEVGFRRSAITNFSELKEHVLTRRKEAKNLEKRLDEWLTRINSVEKTLNDLMELKTMAQELRDARTSFNSXFNQVEKRISVIEDQIDEIKQDDKAAETCNWRWVSESLRQLRASVDAFHARASHYNAGECLHQLAALNSRLNCAQEMARRDSIGEVPPVPWRTVVGSGIAGEAKLDHLRLVSLIGREVNKENSPAATRWLFSFQAGALAGGQIVLQAAKPNAHGQPVVATRNLLNPAGIVAVLKQRPRLVAAAVQAFYLRDPIDLRACRVFKTFLPETRIMTSYYAIEWSLWTLVDVLHAENSESAHMSHNSYDPPSDVARHLTHLPMSPIPDYIIARFRYRHRSRVRLTARKLSPAFMRCSSEIQRYSTMLERGFNGGYCRSTTVRVVTEATRMLSF

SEQ ID NO: 16012 - protein, 397 aa, Homo sapiens
MAHACNPSTLGGQGKKVNVSNLETLLNNIEIEVGKEEYEDLLNHLPVDENEMVDVNVVMDEAKAFTGEKVNVSNLGNELRKMGLVLTDEEHEKLLKTLPIRRPRVNTKKVEIFLENMGTKIKDEELEELITQLPTEERNSVNINEKVIYTKTPSVGHQHQRPKVDKTTKMGRNQSRKAENSKNQSTSSPPKDCSSSPATEQSWTENDFDKLTEVGFRRSVITNFSELKEHVRTHLKEAKSLEKRLDEWLTRINSVEKTINDLMELKTMARELHDACTSFNSRFDQVEEKVKRATDTYNLGIALEHRKEMLNLWQKIRGDLIGMDSRNESFYDTFSTYTWSWNVCQELLSPKDLRLYDAYVNRNSSHNSRSSSSSDTSECYTDSGRKRKRKGLKGFQQ

SEQ ID NO: 16013 - protein, 75 aa, Homo sapiens
GTRDPGVWVHSLLLSESQESDQQPLPPPGPRSPELIPMELCRSLALLGGSLGLMTWLIACGTDHLPWTSLSLVRL

SEQ ID NO: 16014 - protein, 130 aa, Homo sapiens
CTSGTMPLVSVFMEADESEKAAREQEPLEGTEQTLDAEEEQEESEEAACGSKKRVVPGIVYLGHIPPRFRPLHVRNLLSAYGEVGRVIFHAEDRFLRRIKNAYSICRRIIAFYTYDFTNQLYIYIIYFIK

SEQ ID NO: 16015 - protein, 77 aa, Homo sapiens
PLMHILKYTMVYLVCPLLSSSHNLPFTPVKLLSYSLFYPYFHFSRFLRLCCLRLFLSFFYSSSLLHSLYSFPFLLSP

SEQ ID NO: 16016 - protein, 98 aa, Homo sapiens
  misc_feature (1)...(98): Xaa = X or * as defined in Table 2
IINTSISLWFLGLSSIIHHYQERFLXFNXFGSYMVFIEIFFGISSAFFVCXWPKYLLYFRYCRCFLILLLLSIFEFDLCYLVLXIFMFFLFFYMFLCV

SEQ ID NO: 16017 - protein, 47 aa, Homo sapiens
DQFRPLRPKNPTPPRTCEHTLTATPVTRAATHTHTHSHPHPHAHPRR

SEQ ID NO: 16018 - protein, 190 aa, Homo sapiens
KRCFQVFDYALPPKRWFKDNYNADFLEDRQLGLQAFLQNLVAHKDIANCLAVREFLCLDDPPGPFDSLEESRAFCETLEETNYRFTERTTWKNKRRWIHLKKLLSEKQLHIDTLENRIRTLSLEPEESLDVSETEGEQILKVESSALEVDQDVLDEESRADNKPCLSFSEPENAVSEIEVAEVAYDAEED

SEQ ID NO: 16019 - protein, 37 aa, Homo sapiens
QLHTLDSFSQDVKIRFHIIMRLFPLLMPIFFTWQDNV

SEQ ID NO: 16020 - protein, 462 aa, Homo sapiens; identical to SEQ ID NO: 8358
  DOMAIN (113)..(145): GTP-binding elongation factors proteins domain identified by eMATRIX, accession number BL00301B, p-value=7.158e-27, raw score of 20.09
  DOMAIN (28)..(417): Elongation factor Tu family domain identified by PFam, accession name GTP_EFTU, E-value=7.9e-128, PFam score of 433.5

SEQ ID NO: 16021 - protein, 418 aa, Homo sapiens; identical to SEQ ID NO: 8354
  DOMAIN (90)..(122): GTP-binding elongation factors proteins domain identified by eMATRIX, accession number BL00301B, p-value=5.500e-31, raw score of 20.09
  DOMAIN (5)..(373): Elongation factor Tu family domain identified by PFam, accession name GTP_EFTU, E-value=5.6e-138, PFam score of 467.7

SEQ ID NO: 16022 - protein, 220 aa, Homo sapiens; identical to SEQ ID NO: 13667
  DOMAIN (97)..(129): GTP-binding elongation factors proteins domain identified by eMATRIX, accession number BL00301B, p-value=5.500e-31, raw score of 20.09
  DOMAIN (12)..(163): Elongation factor Tu family domain identified by PFam, accession name GTP_EFTU, E-value=4.5e-88, PFam score of 299.5

SEQ ID NO: 16023 - protein, 168 aa, Homo sapiens; identical to SEQ ID NO: 8356
  DOMAIN (9)..(21): GTP-binding elongation factors proteins domain identified by eMATRIX, accession number BL00301A, p-value=3.842e-13, raw score of 12.41
  DOMAIN (5)..(164): Elongation factor Tu family domain identified by PFam, accession name GTP_EFTU, E-value=1.8e-65, PFam score of 223.3

SEQ ID NO: 16024 - protein, 490 aa, Homo sapiens
  DOMAIN (14)..(26): GTP-binding elongation factors proteins domain identified by eMATRIX, accession number BL00301A, p-value=5.645e-11, raw score of 12.41
  DOMAIN (11)..(457): Elongation factor Tu family domain identified by PFam, accession name GTP_EFTU, E-value=2.9e-78, PFam score of 266.4
  misc_feature (1)...(490): Xaa = X or * as defined in Table 2
PLKAKMGKEKTHINIVVIGHVDTGKSTTTGHLIYKCGGIDKRTIEKFEKEAAEMGKGSFKYAXVLDKLKAERERGITIDISLWKFETSKYYVDXSLIAPGHRDFYSKTXFTGTISRLDLVWGAPFLGGCLPXLFAAGVWWNLKAGISQEWGRTREHALLGLHTGVWKQTKLFGVNKNWISTXGHPTAQKKILKEIVKGKSALTLRKIGYNPDTSSILCPISGWNGDNMLEPSANMPWFQGDGKVTRKDGNASGTTLLEALDCILPPTRPTDKPLGLPLQDVYKIGGIGTVPVGRVETGVLKPGMVVTFGPVNVTTEVKSVEMHHEALGEALPGDNVGFNVKNVSVKDVRRGNVAGDSKNDPPMEAAGFPAQVIILNHPGQISAGYAPVLDCHTAHIACKFAELKEKIDRRSGKKLEDGPKFLKSGDAAIVDMVPGKPMCVESFSDYPPLGCFAVRDMRQTVAVGVIKAVDKKAAGAGKVTKSAQKAQKAK

SEQ ID NO: 16025 - protein, 81 aa, Homo sapiens
  DOMAIN (24)..(41): Nt-dnaJ domain proteins domain identified by eMATRIX, accession number BL00636A, p-value=8.091e-12, raw score of 8.07
  DOMAIN (9)..(74): DnaJ domain identified by PFam, accession name DnaJ, E-value= 5.6e-22, PFam score of 86.5
VTKELLQMDLYALLGIEEKAADKEVKKAYRQKALSCHPDKNPDNPRAAELFHQLSQALEVLTDAAATAAYDKVMYASMHVT

SEQ ID NO: 16026 - protein, 34 aa, Homo sapiens
LCGRLWWLMPVIPALWEAKAGGLLKLRSMRPCLY

SEQ ID NO: 16027 - protein, 133 aa, Homo sapiens
  misc_feature (1)...(133): Xaa = X or * as defined in Table 2
IRLAEFCGIFFQAFSICNSNIWLLPEIPLLGIYPXEXNTKTCTQMFTAALFIISXKVEISQMPIINEKINKLWYIHMTCHTKNKVLIRDTTXMNLENIKLNERGQTKKKKKAIYCLSLFMXYVQNRQIHTDEK

SEQ ID NO: 16028 - protein, 65 aa, Homo sapiens
QSVAQLPRLECNGMILAHCSLHLLGFKRFSCLSLPSSWDYSRLRELPREGREVGAKHTKPGCPII

SEQ ID NO: 16029 - protein, 64 aa, Homo sapiens
  misc_feature (1)...(64): Xaa = X or * as defined in Table 2
ICKWIILPCGLAGSYKIAKWVSGFTLLLTHMVGAAWVXLSLFGYTILFXFPKMSSFLTMKKDIF

SEQ ID NO: 16030 - protein, 152 aa, Homo sapiens
  DOMAIN (105)..(118): 0 kw ZK63212 YDR313C ENDOSOMAL III. domain identified by eMATRIX, accession number DM01970B, p-value=7.614e-09, raw score of 8.60
  DOMAIN (84)..(148): DHHC zinc finger domain identified by PFam, accession name zf -DHHC, E-value=6.8e-27, PFam score of 102.8
DCRMGLRIHFVVDPHGWCCMGLIVFVWLYNIVLIPKIVLFPHYEEGHIPGILIIIFYGISIFCLVALVRASITDPGRLPENPKIPHGEREFWELCNKCNLMRPKRSHHCSRCGHCVRRMDHHCPWINNCVGEDNHWLFLQLCFYTELLSCTH

SEQ ID NO: 16031 - protein, 137 aa, Homo sapiens
PRVRPRVRLLILLLENVSGYRFPVIFQLDASPGHKILPDCMIYSITVSLMFPVVDYISTLYGLGLHLGMSLRIVYALIVLNLCSVSYSTLSFYYRSISYYTLTIDYIYITILSVWIWFFFFFFYLDLFLFHFSLTSS

SEQ ID NO: 16032 - protein, 107 aa, Homo sapiens
  DOMAIN (49)..(104): Tubulin subunits alpha beta, and gamma proteins. domain identified by eMATRIX, accession number BL00227B, p-value=3.250e- 35, raw score of 19.29
  DOMAIN (1)..(96): Tubulin/FtsZ family domain identified by PFam, accession name tubulin, E-value=7.2e-51, PFam score of 182.4
RKLVHIRAGQCGNQIGAKFWEVISDEHGIDPTGTYHGDSDLQLDRISVYYNEATGGKYVPRAILVDLEPGTMDSVRSGPFGQIFRQDNFVFGQSGAEPPSPQACQFP

SEQ ID NO: 16033 - protein, 58 aa, Homo sapiens
  DOMAIN (1)..(35): Tubulin subunits alpha beta, and gamma proteins. domain identified by eMATRIX, accession number BL00227A, p-value=2.828e- 15, raw score of 24.55
  DOMAIN (1)..(22): Tubulin/FtsZ family domain identified by PFam, accession name tubulin, E-value=2.4e-10, PFam score of 44.0
MREIVHIQAGQCGNQIGAKFWEPWKASSIELSQCRNSPSKVFRSKEHDGLPVTPPTRR

SEQ ID NO: 16034 - protein, 150 aa, Homo sapiens
NQMTSKQYTGNSNMPGGLPRQAYTFKTSQLEHKSQMYQVEMNQGQSQGTVDQHLQFQKPSHQVHFSKTDHLPKAHVQSLCGTRFHFQQRADSQTEKLMSPVLKQHLNQQASETEPFSNSHLLQHKPHKQAAQTQPFQSSHLPQNQQQQQI

SEQ ID NO: 16035 - protein, 86 aa, Homo sapiens
SVALNTRKLWSMHLHVQAKLLQEIVRSFSGTTCQPIQHMLRRICVQLCDLASPTALLIMRTVLDLIVEDLQRYFHFALKIFSSNYF

SEQ ID NO: 16036 - protein, 634 aa, Homo sapiens
VTYVELCDLASPTALLIMRTVLDLIVEDLQSTSEDKEKQYTSQTTRLLALLDALASHKACKLAILHLINGTIKGDERYAEIFQDLLALVRSPGDSVIRQQCVEYVTSILQSLCDQDIALILPSSSEGSISELEQLSNSLPNKELMTSICDCLLATLANSESSYNCLLTCVRTMMFLAEHDYGLFHLKSSLRKNSSALHSLLKRVVSTFSKDTGELASSFLEFMRQILNSDTIGCCGDDNGLMEVEGAHTSRTMSINAAELKQLLQSKEESPENLFLELEKLVLEHSKDDDNLDSLLDSVVGLKQMLESSGDPLPLSDQDVEPVLSAPESLQNLFNNRTAYVLADVMDDQLKSMWFTPFQAEEIDTDLDLVKVDLIELSEKCCSDFDLHSELERSFLSEPSSPGRTKTTKGFKLGKHKHETFITSSGKSEYIEPAKRAHVVPPPRGRGRGGFGQGIRPHDIFRQRKQNTSRPPSMHVDDFVAAESKEVVPQDGIPPPKRPLKVSQKISSRGGFSGNRGGRGAFHSQNRFFTPPASKGNYSRREGTRGSSWSAQNTPRGNYNESRGGQSNFNRGPLPPLRPLSSTGYRPSPRDRASRGRGGLGPSWASANSGSGGSRGKFVSGGSGRGRHVRSFTR

SEQ ID NO: 16037 - protein, 195 aa, Homo sapiens
  misc_feature (1)...(195): Xaa = X or * as defined in Table 2
ECLCVSTAVRIRHELKTMLTELLRGGSFEFKDMRVPSALVTLHMLLCSIPLSGRLDSDEQKIQNDIIDILLTFTQGVNEKLTISEETLANNTWSLMLKEVLSSILKVPEGFFSGLILLSELLPLPLPMQTTQVSLPYNMHLINDCSNTFXKASDSVKKQKPSSPFLPKRHKITGXGGDKTETSWSLRKYGGKNFK

SEQ ID NO: 16038 - protein, 196 aa, Homo sapiens
  DOMAIN (62)..(75): EF-hand calcium-binding domain proteins domain identified by eMATRIX, accession number BL00018, p-value=4.522e-09, raw score of 7.41
  DOMAIN (54)..(83): EF hand domain identified by PFam, accession name efhand, E- value=0.0019, PFam score of 24.9
  misc_feature (1)...(196): Xaa = X or * as defined in Table 2
SHGTPGRPTRPVEFFSGGSAGSFSPWFPKKAKKRAGGADSNVFSMFEQTQMQEFKEAFSIMDQNRDGFIDKNDLRDTFAALGEVNVKNEEIDEMIKEAPGPLNFTVFLTNVWGENLREADPEETILNAFKVFDPXRPKGCMKADYVSGKMLTHAGRRRFSKEEVDQMFAGLPPLTXLGNLDYKNLVHIITHGEEKD

SEQ ID NO: 16039 - protein, 497 aa, Homo sapiens
YIRGHSTPRKLWSMHLHVQAKLLQEIVRSFSGTTCQPIQHMLRRICVQLCDLASPTALLIMRTVLDLIVEDLQSTSEDKEKQYTSQTTRLLALLDALASHKACKLAILHLINGTIKGDERYAEIFQDLLALVRSPGDSVIRQQCVEYVTSILQSLCDQQSSHIDVVRFPCVVYINEVRVIPPGVRAHSSLPDNRAYGYLHSHHFLELVTLLLSIPVTSAHPGVLQATKDVLKFLAQSQKGLLFFMSEYEATNLLIRALCHFYDQDEEEGLQSDGVIDDAFALWLQDSTQTLQCITELFSHFQRCTASEETDHSDLLGTLHNLYLITFNPVGRSAVGHVFSLEKNLQSLITLMEYYSKEALGDSKSKKSVAYNYACILILVVVQSSSDVQMLEQHAASLLKLCKADENNAKLQELGKWLEPLKNLRFEINCIPNLIEYVKQNIDNLMTPEGVGLTTALRVLCNVACPPPPVEGQQKDLKWNLAVIQLFSAEGMDTFIR

SEQ ID NO: 16040 - protein, 59 aa, Homo sapiens
  DOMAIN (42)..(56): GLUTAMYL-TRNA SYNTHETASE SIGNATURE domain identified by eMATRIX, accession number PR00987C, p-value=2.667e-09, raw score of 9.71
  misc_feature (1)...(59): Xaa = X or * as defined in Table 2
GSLQRDRWPTSSWRTGRQGSSLLRPRWISFLAQLWRVXRIPAGTFVIRIEDGNGRRAFI

SEQ ID NO: 16041 - protein, 301 aa, Homo sapiens
HEEKPCSGQNWTQPVPGWVWLEVDPVDLVKSPQMSAVAGLGCGQGTGAPPELGATAGWTRDPPTANCSPGGGIRVEVFPPGGGGSRLSPPVLAGRTRGFPAAPSFFFMYAHVEIDGLALLEAQVQFRALVWVLGMFCKFTLLFHPLEMVLQCNIEVKGITSVPEANSNKRPSPISIFDADHEVPAGIRHTLHSCARKLIHRGLSKELPIVAALMTVFFIMQLVGQVPAALWVIFGEDRFRWSATMIGLSLAVFGILHALAQAFVTGPATKRFGEKQAIIAGMAADALGYVLLAFATDMAIF

SEQ ID NO: 16042 - protein, 845 aa, Homo sapiens
  DOMAIN (301)..(316): PHD-finger domain identified by eMATRIX, accession number PF00628, p-value=5.935e-09, raw score of 15.84
  DOMAIN (288)..(333): PHD-finger domain identified by PFam, accession name PHD, E- value=4.9e-15, PFam score of 63.4
FRAAATWPGPPCARRAVNKVVYDDHESEEEEEEEDMVSEEEEEEDGDAEETQDSEDDEEDEMEEDDDDSDYPEEMEDDDDDASYCTESSFRSHSTYSSTPGRRKPRVHRPRSPILEEKDIPPLEFPKSSEDLMVPNEHIMNVIAIYEVLRNFGTVLRLSPFRFEDFCAALVSQEQCTLMAEMHVVLLKAVLREEDTSNTTFGPADLKDSVNSTLYFIDGMTWPEVLRVYCESDKEYHHVLPYQEAEDYPYGPVENKIKVLQFLVDQFLTTNIAREELMSEGVIQYDDHCRVCHKLGDLLCCETCSAVYHLECVKPPLEEVPEDEWQCEVCVAHKVPGVTDCVAEIQKNKPYIRHEPIGYDRSRRKYWFLNRRLIIEEDTENENEKKIWYYSTKVQLAELIDCLDKDYWEAELCKILEEMREEIHRHMDITEDLTNKARGSNKSFLAAANEEILESIRAKKGDIDNVKSPEETEKDKNETENDSKDAEKNREEFEDQSLEKDSDDKTPDDDPEQGKSEEPTEVGDKGNSVSANLGDNTTNATSEETSPSEGRSPVGCLSETPDSSNMAEKKVASELPQDVPEEPNKTCESSNTSATTTSIQPNLENSNSSSELNSSQSESAKAADDPENGERESHTPVSIQEEIVGDFTSEKSTGELSESPGAGKGASGSTRIITRLRNPDSKLSQLKSQQVAAAAHEANKLFKEGKEVLVVNSQGEISRLSTKKEVIMKGNINNYFKLGQEGKYRVYHNQYSTNSFALNKHQHREDHDKRRHLAHKFCLTPAGEFKWNGSVHGSKVLTISTLRLTITQLETTSLHPSFIPTGHHIGQIGSRQFRCVANPENLHWL

SEQ ID NO: 16043 - protein, 145 aa, Homo sapiens
RTTAARRAVNKVLFDDHVSEEEEEEEDMVSEEEEEEDGDAQETQDSEDDEEDEMEEDDDDSDYPEEMEDDDDDASYCTESSFRSHSTYSSTPGTHPAQLLQTPSPPPLPSPLAHSCAVHPAPISPQPRLPPKQRGNARAHQVAKN

SEQ ID NO: 16044 - protein, 94 aa, Homo sapiens
GARAEARAGSGQGAGLGVSSPVRWRGWSDKGAERPGGPLSPLREVSRAGPSGHAARGQQPGRPRFPPPGPRPPRRRCPCTRARPGGAAGGGPCL

SEQ ID NO: 16045 - protein, 87 aa, Homo sapiens
ITSSLLFPSSIFKCRHAHTGLLISKHGDHRVSKESPLNSPASQAGSATFATTPLTPPKLQLRAPWQPLHSFRPCPGVTSRKRTARAR

SEQ ID NO: 16046 - protein, 325 aa, Homo sapiens
PLLTSAASSKLLTSSWPTSKCSVVRTSSGPCTSSKDTMQSPERPCLMPLKKWQELSPETSGKRKKRKQMNQYSYIDFKFEQGDIKIEKRMFFLENKRRHCRSYDRRALLPAVQQEQEFYEQKIKEMAEHEDFLLALQMNEEQYQKDGQLIECRCCYGEFPFEELTQGANAHLFCKECLIRYAQEAVFGSGKLELSCMEGSCTCSFPTSELEKVLPQTILYKYYERKAEEEVAAAYADELVRCPSCSFPALLDSDVKRFSCPNPHCRKGCCSPSGFSPRNSQRQLLTPRQVAEPTPTCISEPRKSRVSVGSENPAATWGLRCRRPP

SEQ ID NO: 16047 - protein, 34 aa, Homo sapiens
ELLILTLIFFSFQEFSGYVQQVKYAMTRIKAGMP

SEQ ID NO: 16048 - protein, 142 aa, Homo sapiens
CRDDPRVRLSRSRPVGPHFLSPTMFRRKLRGLDYHNPAAFNCKDETEFRNFIVWLEDPKIRHYEIEDRGNLRNIHSSDWPKFFEKYLRDVNCPFKIQDRQEAIDWLLGLSVRLEYGDNAEKYKDFRPDNSKTADNGTKNAEP

SEQ ID NO: 16049 - protein, 418 aa, Homo sapiens; identical to SEQ ID NO: 8354
  DOMAIN (90)..(122): GTP-binding elongation factors proteins domain identified by eMATRIX, accession number BL00301B, p-value=5.500e-31, raw score of 20.09
  DOMAIN (5)..(373): Elongation factor Tu family domain identified by PFam, accession name GTP_EFTU, E-value=5.6e-138, PFam score of 467.7

SEQ ID NO: 16050 - protein, 85 aa, Homo sapiens
VAVVQIIFLPVFIAEKYKDLVPDNSKTADNATKNAEPLINLDVNNPDFKAGVMALANLLQIQRHDDYLVMLKAIRILVQERLTQD

SEQ ID NO: 16051 - protein, 319 aa, Homo sapiens
  misc_feature (1)...(319): Xaa = X or * as defined in Table 2
AATVLTTIGEAPSFRSDSAPARPLAASPVPAPPAPPRFFSPGRGPGDQSEKRWTMFRRKLTSLDYHNPAGFNCKDETEFRNFIVWLEDQKIRHYKIEDRGNLRNIHSSDWPKFFEKYFKRCXTCPFKIQDRQESYLTGFFGLAVRLEYGDNAEKYKDLVPDNSKTAXQLQLKIAEPLINLDVNNPDFKAGVVGFGXTWLQIQRHDGLPGQMLKANSGFWVQERLDHQGCQFAXGQIKQKRGLPVALDKHILGFDTGDAVLNEAAQILRLLHIEELRELQTKINEAIVAVQAIIADPKTDHRLGKSLEDEHLRTSASHLL

SEQ ID NO: 16052 - protein, 57 aa, Homo sapiens
ILFWIIQLNLECSEFSWRLRQGRGIMLFFFPFLFFFETESHSVAQTGVQWCDLGSLQ

SEQ ID NO: 16053 - protein, 71 aa, Homo sapiens
  DOMAIN (17)..(67): KRAB box domain identified by PFam, accession name KRAB, E- value=0.019, PFam score of -1.5
GLPRCASCTACGMLPKTLEEVAMDITWEKWKQMDTVQKSIYRNMLEKYRNLVLLEKPYEYHDWENFQLLFR

SEQ ID NO: 16054 - protein, 550 aa, Homo sapiens
  DOMAIN (217)..(239): NAPIN SIGNATURE domain identified by eMATRIX, accession number PR00496A, p-value=8.138e-09, raw score of 6.68
  DOMAIN (187)..(547): Zinc finger, C2H2 type domain identified by PFam, accession name zf-C2H2, E-value=3.8e-47, PFam score of 170.1
  misc_feature (1)...(550): Xaa = X or * as defined in Table 2
GLPRCASVQPVECYQRRWKRWLWDITWEKWKQMDTVQKSIYRNILEKYRNLVLLDGKLAAGAKTSRVEQQDISKEDXSQRLEMEELAKRKSVPEEIWKSRGQFKNQQLNKENNLGQEIATCTKIPTRKRDIESNEFREKFYCKINTCCMNRXILWKRIVINMVHVERCSNKTQIXLYKESMMEKKKPCKYSECGRTFRGHITLVQHQITHCGERPCKCTECRKGFNQSSHLRNNQRKTLSGEKPYKCSECGKAFSYCLVLNQHQRIHSGEKPYEGTECGKTFIQSSYLTQHQRTSHTGEKPYTCLECGRLFSQNTHLTLHQRIHTGEKPYECNECGRSFSQTAHLTQHQRMYTGEKLYECNECEKAFHDHSALIQHHIVHTAEKPYDIMTGKTFSYCSDLIQHQRMHTGEKPYKCNECGNAFSDCSSLIQHQRTHTGEEPYECKQCGKAFSRSTYLTQHQRSHAGEKQYKCNECEKTFSLSSFLTQHMRVQTGEKPYKYNEYGKAFSDCSGHFQRTHTGEKPCECNDCGKPFSFCSALIQHKRIHTRKKP

SEQ ID NO: 16055 - protein, 89 aa, Homo sapiens
  misc_feature (1)...(89): Xaa = X or * as defined in Table 2
REEKEWPPHTQPWYPEGCFKDGQHYEEGSVIKENCNSXWTAQNYSQFWGMTLEDGFKFRLGTLPPSPMLLSMNEMTVSVPSDSRMCMYL

SEQ ID NO: 16056 - protein, 333 aa, Homo sapiens [sequence omitted]

SEQ ID NO: 16057 - protein, 504 aa, Homo sapiens
  DOMAIN (145)..(194): PRECURSOR GLYCOPROTEIN SIGNAL CELL domain identified by eMATRIX, accession number PD02576A, p-value=7.000e-17, raw score of 27.60
  DOMAIN (268)..(499): Papain family cysteine protease domain identified by PFam, accession name Peptidase_C1, E-value=6e-45, PFam score of 162.8
VHCSEFPGRPPRPRTRGRKVEAIPVFQRMWTGYKILIFSYLTTEIWMEKQYLSQREVDLEAYFTRNHTFLQGTHFKRAIFQGQYCRNFGCCEDRDDGCVTEFYAANALCYCDKFCDRENSDCCPDYKSFCREEKEWPPHTQPWYPEGCFKDGQHYEEGSVIKENCNSCTCSGQQWKCSQHVCLVRPELIEQVNKGDYGWTAQNYSQFWGMTLEDGFKFRLGTLPPSLMLLSMNEMTASLPATTDLPEFFVASYKWPGWTHGPLDQKNCAASWAFSTASVAADRIAIQSKGRYTANLSPQNLISCCAKNRHGCNSGSIDRAWWYLRKRGLVSHACYPLFKDQNATNNGCAMASRSDGRGKRHATKPCPNNVEKSNRIYQCSPPYRVSSNETEIMKEIMQNGPVQAIMQVHEDFFHYKTGIYRHVTSTNKESEKYRKLQTHAVKLTGWGTLRGAQGQKEKFWIAANSWGKSWGENGYFRILRGVNESDIEKLIIAAWGQLTSSDEP

SEQ ID NO: 16058 - protein, 32 aa, Homo sapiens
CSFIPGMEDRFNIRKTINVIHHINRTKNKNHI

SEQ ID NO: 16059 - protein, 25 aa, Homo sapiens
ECTFFSSVHGTFSKTDHIIGHKTSL

SEQ ID NO: 16060 - protein, 168 aa, Homo sapiens; identical to SEQ ID NO: 8356
  DOMAIN (9)..(21): GTP-binding elongation factors proteins domain identified by eMATRIX, accession number BL00301A, p-value=3.842e-13, raw score of 12.41
  DOMAIN (5)..(164): Elongation factor Tu family domain identified by PFam, accession name GTP_EFTU, E-value=1.8e-65, PFam score of 223.3

SEQ ID NO: 16061 - protein, 347 aa, Homo sapiens; identical to SEQ ID NO: 8800
  DOMAIN (53)..(130): TRAF-type zinc finger domain identified by PFam, accession name zf-TRAF, E-value=3.7e-24, PFam score of 93.7
  misc_feature (1)...(347): Xaa = X or * as defined in Table 2

SEQ ID NO: 16062 - protein, 145 aa, Homo sapiens
NETQPKACREQNMEGDFSVCRNCKRHTVSANFTLHEAYCLRFLVLCPECEEPVPKETMEEHCKLEHQQAYGSGIGKRFWFQERLAVLLRSVKRGCEKGRSWKAVRWSPVSRLSMSIPPGAPDLSLWRYSSSGSRCQHKTGLMNNS

SEQ ID NO: 16063 - protein, 135 aa, Homo sapiens
SGFMDHLEEKADLSELVEKEELGFFQYYRERCHQKVYHPITKPGGSAKDAAPGGGHHQAGPGQGGDEGIRMMFCVSPNRATFVVSVVPLVSIIDVIYGRYLRKLTKVTQDSLAQATQEERIGNVKNCSSFWESPP

SEQ ID NO: 16064 - protein, 46 aa, Homo sapiens
MRNIFHFTRGSGTTSVKRGYVQAAGGPVPPRRSQEGRLAFRLHVPG

SEQ ID NO: 16065 - protein, 379 aa, Homo sapiens
  DOMAIN (275)..(307): ABC transporters family proteins domain identified by eMATRIX, accession number BL00211B, p-value=6.727e-30, raw score of 13.37
  DOMAIN (157)..(348): ABC transporter domain identified by PFam, accession name ABC_tran, E-value=4e-17, PFam score of 70.3
MGRGAGAALGRWSRAPLEELLPGRGSGRLGGPRGPRTAPGAVGLGPAAAGEEAWRRGRAAPSRDDQRLRPMAPGLSEAGKLLGLEYPERQRLAAAVGFLRCPIIDAIYTNPTVDYSDNLTRLCLGLSGVFLCGAAANAIRVYLMQTSRQRVVKRLRTSLFSSILGQEVAFFDKAGTGELINRLSSDTALLGRSVTENLSDGLRAGARASVGIRMMFCVSPNRATFVVSVVRLVSIIDVIYGRYLRKLTKVTQDSLAQATQEERFNTVVGEKGVLLSGGQKQRIAIARALLKNPKILLLDEATSALDAENEYLVQEALDPLMDGRTALVIAHHLSTIKNANMVAVLDQGKITEYGKHEELLSKPNGIYRKLMNKQSFISA

SEQ ID NO: 16066 - protein, 150 aa, Homo sapiens
  misc_feature (1)...(150): Xaa = X or * as defined in Table 2
GDRPFRVXDPRAGQAATFWTDPSLSXSLLLGVMFPAAPSPRTPGTGPRRGPLAGLGPGSTPRTASRMGLPLGSAVSSPVLFSPGGRRSSLISRGTPTRMLPHHSITESVNYDAKTIGSSLPVKVMEALTLAEVDDQLTININEGGWACLV

SEQ ID NO: 16067 - protein, 522 aa, Homo sapiens
  DOMAIN (5)..(279): ABC transporter transmembrane region domain identified by PFam, accession name ABC_membrane, E-value=2.2e-55, PFam score of 197.4
ECLCFLAAVGFLTMSRVISMSAPFFLGKIIDVIYTNPTVDYSDNLTRLCLGLSAVFLCGAAANAIRVYLMQTSGQRIVNRLRTSLFSSILRQEVAFFDKTRTGELINRLSSDTALLGRSVTENLSDGLRAGAQASVGISMMFFVSPNLATFVLSVVPPVSIIAVIYGRYLRKLTKVTQDSLAQATQLAEERIGNVRTVRAFGKEMTEIEKYASKVDHVMQLARKEAFARAGFFGATGLSGNLIVLSVLYKGGLLMGSAHMTVGELSSFLMYAFWVGISIGGKQECIPSQLGTNDFLVFVSLLVFENQDGKVRRGYAVVEGKLGMRNIFHFTRGSGTTSVKRGYVQAAGGPVPPRRSQEGRLAFRLHVFKFRAQARLQPDGQIPRCPSRCSLESCSQPPLLRGPRTTIDHRYLKLQIKGGNTVYAKFSPVYRVDQVYEVSRETPKLAPHVIGFNNTVKSSPTSISGSYVASQRLKDLGHAQMVVDELFSSHSDLDSDSELDRAVTQISVDLMDDYPASDPRWG

SEQ ID NO: 16068 - protein, 108 aa, Homo sapiens
  misc_feature (1)...(108): Xaa = X or * as defined in Table 2
GWLAHTANERPVRCFPWLEGFGLENIRAPTLNFXQIQQSLAIFVEPIKTILLPFCFFRIFSTRVRICTYSSHSFPGPGAGLLHFCSSSLVRFKISFGDTVAVAPVPDF

SEQ ID NO: 16069 - protein, 132 aa, Homo sapiens
  misc_feature (1)...(132): Xaa = X or * as defined in Table 2
GKRAGECWRRSLRPRGPRGETRAASPSSARPSLALASAPRPKSGPRPRQGPRRPLWPRGLKGQVCARGPGRGGPGGVGGRRSASARAPRVPGDQPPPPPAPSSXEDWTXEIGRLSSHAPLAVLHTRSALLNS

SEQ ID NO: 16070 - protein, 160 aa, Homo sapiens
KWGFCRGFLKWLTSKKRAFGLRATRDIKAEELFLWVPRKLLMTVESAKNSVLGPLYSQDRILQAMGNIALAFHLLCERASPNSIWQPDIQTLPSEYDTPLYFEEDEVRYLQSTQAIHDVFSQYKNTARQYAYFYKVIQVSSCLQFKYIFHRVGRKEELSP

SEQ ID NO: 16071 - protein, 433 aa, Homo sapiens
  DOMAIN (138)..(170): GTP-binding elongation factors proteins domain identified by eMATRIX, accession number BL00301B, p-value=5.500e-31, raw score of 20.09
  DOMAIN (122)..(377): Elongation factor Tu family domain identified by PFam, accession name GTP_EFTU, E-value=3.8e-69, PFam score of 235.7
MPSIKLQSSGGEIFEVDVEIVKQSVTIKTMLEDLGMNDEGDHDPVPLPNVNAAILKKVIQWCTHHEDDSPPPKVYENKEKRTDDIPVWDQEFLKVDQGTLFELILAANYLDIKGLLDVTCKTVANMKFETSKYYVSIIDAPGHRDFIKNMITGTSQADCAVLIVAAGVGEFEAGISKNGQTHEHALLAYTLGVKQLIVGVNKMDSTEQPYSQKTYEEIVKEVNTYIMKIGCNLDTAAFVLISVNVTTEVKSVEIHHEALSEALPGDNVGFNVKNVSVKDVRHGNNAGDSKNDPPMEAAGFTAQVIILNHPGQISAGYALVLDCHTAHTACKFAELKEKIDRCSGKKLEDGPKFLKSGDAAIIYMVPGKPMCVESFSDYPPLGHFAVGHMRQTVAMGIIKAEDRKAAGVGKVTKSAQKAPKPSEYYPLYLPPQS

SEQ ID NO: 16072 - protein, 75 aa, Homo sapiens
  DOMAIN (30)..(39): Zinc finger C3HC4 type (RING finger), proteins. domain identified by eMATRIX, accession number BL00518, p-value=8.714e-10, raw score of 12.23
  DOMAIN (14)..(54): Zinc finger, C3HC4 type (RING finger) domain identified by PFam, accession name zf-C3HC4, E-value=1.9e-09, PFam score of 34.9
NKMDDLTLLDLLECPVCFEKLDVTAKVLPCQHTFCKPCLQRVFKAHKELRCPECRTPVFSNIEALPANLLLVRLL

SEQ ID NO: 16073 - protein, 138 aa, Homo sapiens
  DOMAIN (94)..(118): GTP-BINDING SAR1 PROTEIN SIGNATURE domain identified by eMATRIX, accession number PR00328A, p-value=9.521e-11, raw score of 10.62
CTDCCRGCRVSQLLETALLITRHPSHVGIEKKAEGPSHQISIPETDTSASILVASSCALRTNLKNQLVCKYLNHIMGLLDRLSVLLGLKKKEVHVLCLGLDNSGKTTIINKLKPSNAQSQNILPTIGFSIEKFTSSSL

SEQ ID NO: 16074 - protein, 127 aa, Homo sapiens
TAKAALYPLVGKGGGAGGPVLAMRPNQAPVSGRVYIHRDYSRVTRCQFQTRFPAQLDNRIAGHPFEKTVLTLNNLYAEAEKLGGQAYLEGCWACLTPYTIFLCMETNYEKVLKKDFQYIPQLTESIY

SEQ ID NO: 16075 - protein, 122 aa, Homo sapiens
  DOMAIN (52)..(61): Zinc finger C3HC4 type (RING finger), proteins. domain identified by eMATRIX, accession number BL00518, p-value=9.667e-09, raw score of 12.23
  DOMAIN (36)..(91): Zinc finger, C3HC4 type (RING finger) domain identified by PFam, accession name zf-C3HC4, E-value=1.4e-05, PFam score of 22.3
RRQLGVALIPSHRMDYKSSLIQDGNPMENLEKQLICPICLEMFTKPVVILPCQHNLCRKCANDIFQAANPYWTSRGSSVSMSGGQFRCPTCRHEVIMDRHGVYGLQRNLLVENIIDIYKQEC

SEQ ID NO: 16076 - protein, 79 aa, Homo sapiens
TETKINFQNVKAMDLIHLFIYLFYFVFETESCSVARLGCSGMVLARCNLRLPGSGDSPASASRVAGTAGACHHARLIFA

SEQ ID NO: 16077 - protein, 109 aa, Homo sapiens
  DOMAIN (42)..(107): Sm protein domain identified by PFam, accession name Sm, E- value=0.00055, PFam score of 26.6
LRRRPRRGKRKECRVQAGSWCGRMAVSHSVKERTISENSLIILLQGLQGRVTTVDLRDESVAHGRIDNVDAFMNIRLAKVTYTDRWGHQVKLDDLFVTGRNVRYVHIPE

SEQ ID NO: 16078 - protein, 56 aa, Homo sapiens
  DOMAIN (3)..(15): GTP-BINDING ELONGATION FACTOR SIGNATURE domain identified by eMATRIX, accession number PR00315D, p-value=2.895e-11, raw score of 10.84
  DOMAIN (1)..(34): Elongation factor Tu family domain identified by PFam, accession name GTP_EFTU, E-value=1.5e-09, PFam score of 34.9
  misc_feature (1)...(56): Xaa = X or * as defined in Table 2
MITGTSQADCAVLIVAAGVGEFXAGISKNGQTRRDMRKXLRKSALTLRKLATTPTQ

SEQ ID NO: 16079 - protein, 140 aa, Homo sapiens
  DOMAIN (90)..(122): GTP-binding elongation factors proteins domain identified by eMATRIX, accession number BL00301B, p-value=5.500e-31, raw score of 20.09
  DOMAIN (5)..(140): Elongation factor Tu family domain identified by PFam, accession name GTP_EFTU, E-value=1.1e-78, PFam score of 267.8
MGKEKTHINIVVIGHVDSGKSTTTGHLIYKCGGIDKRTIEKFEKEAAEMGKGSFKYAWVLDKLKAERERGITIDISLWKFETSKYYVTIIDAPGHRDFIKNMITGTSQADCAVLIVAAGVGEFEAGISKNGQTREHALLA

SEQ ID NO: 16080 - protein, 48 aa, Homo sapiens
  DOMAIN (5)..(33): Nucleoside diphosphate kinases domain identified by PFam, accession name NDK, E-value=4.6e-10, PFam score of 41.9
TRRPTARGMLEETNPADSKPGTIRGDFCIQVGRTFFYSPVFFKNSFFY

SEQ ID NO: 16081 - protein, 226 aa, Homo sapiens
MPEPPTHSMGSCAARASPTSTTPCSTAPSPIDHPRAEECERTAQDWQAASPAAPVRDPLGLAISKLDLVTFLEGKKEPWTVKSEETIAAQPEVGGKLSDLVARGTALGASSTRGLQGGPSGFLVTPSGDQMWAELWPVLVAAGHTFGLIRDSKLRKEEGILTYPLAQYQQVWFFFHHKFCWQGRWRHIVELYANVTLLFALAWTSKGIVTYCWAQQHGDMSLLYGP

SEQ ID NO: 16082 - protein, 220 aa, Homo sapiens; identical to SEQ ID NO: 13667
  DOMAIN (97)..(129): GTP-binding elongation factors proteins domain identified by eMATRIX, accession number BL00301B, p-value=5.500e-31, raw score of 20.09
  DOMAIN (12)..(165): Elongation factor Tu family domain identified by PFam, accession name GTP_EFTU, E-value=4.1e-82, PFam score of 279.4

SEQ ID NO: 16083 - protein, 53 aa, Homo sapiens
DVRTSWKLGKGLAISKLDLVTFLEGKKEPWTVKSEETIAAQPVQMYNLIPEHF

SEQ ID NO: 16084 - protein, 125 aa, Homo sapiens
HCSQGLLPTPLLRVSTLLFKLASFTMGNLPPSISPSSPLACVLKSLKPLHLLPDLKSKHLIFFSNTAWPQYKLDNGSKWPENDTFDFSIPRDLDTFCRKKGKWSEVPYVQAFFTLCSLLSYMTHT

SEQ ID NO: 16085 - protein, 858 aa, Homo sapiens
  DOMAIN (103)..(135): GTP-binding elongation factors proteins domain identified by eMATRIX, accession number BL00301B, p-value=8.031e-21, raw score of 20.09
  DOMAIN (17)..(587): Elongation factor Tu family domain identified by PFam, accession name GTP_EFTU, E-value=2.8e-107, PFam score of 364.2
MVNFTVDQIRAIMDKKANIRNMSVIAHVDHGKSTLTDSLVCKAGIIASARAGETRFTDTRKDEQERCIPIKVNAISLFYELSENDLNFIQQSKDGAGFLINLIDSPGHVDFSSEVTAALRVTMGALVVVDCVSGVCVQTETVLRQAIAERIKPVLMMNKMDRALLELQLEPEELYQTFQRIVENVNVIISTYGEGESGPMGNIMIDPVLGTVGFGSGLHGWAFTLKQFAEMYVAKFAAKGEGQLGPAERAKKVEDMMKKLWGDRYFDPANGKFSKPATSPEGKKLPRTFCQLILDPIFKVFDAIMNFKKEETAKLIEKLDIKLDSEDKDKEGKPLLKAVMRRWLPAGDALLQMITIHLPSPVTAQKYRCELLYEGPPDDEAAMGIKSCDPKGPLMMYISKMVPTSDKGRFYAFGRVFSGLVSTGLKVRIMGPNYTPGKKEDLYLKPIQRTILMMGRYVEPIEDVPCGNIVGLVGVDQFLVKTGTITTFEHAHNMRVMKFSVSPVVRVAVEAKNPADLPKLVEGLKRLAKSDPMVQCIIEESGEHIIAGAGELHLEICLKDLEEDHACIPIKKSDPVVSYRETVSEESNVLCLSKSPNKHNRLYMKARPFPDGLAEDIDKGEVSARQELKQRARYLAEKYEWDVAEARKIWCFGPDGTGPNILTDITKGVQYLNEIKDSVVAGFQWATKEGALCEENMRGVRFDVHDVTLHADAIHRGGGQIIPTARRCLYASVLTAQPRLMEPIYLVEIQCPEQVVGGIYGVLNRKRGHVFEESQVAGTPMFVVKAYLPVNESFGFTADLRSNTGGQAFPQCVFDHWQILPGDPFDNSSRPSQVVAETRKRKGLKEGIPALDNFLDKL

SEQ ID NO: 16086 - protein, 57 aa, Homo sapiens
VQLKASTICQISRILSRVLACLMRESSSEPKEVSGVCVQTETVLRQAIAERIRPSSK

SEQ ID NO: 16087 - protein, 302 aa, Homo sapiens
  DOMAIN (238)..(264): Dihydropteroate synthase proteins domain identified by eMATRIX, accession number BL00792F, p-value=8.342e-09, raw score of 17.58
RRRNSDGNACQPATHLLLSARFITGHGQKLKSELKKTLQVIMLNIQKVRIPTRDGYNEKDILSTGKNVEKLELSNIAGYPSNIEKKEYQEQSVLSCCSERKDANPKSVVCSFFMQEQCTKGEKRFLIPGTLSVDRHLRYFGILPTVSNAAVVKEVPTVSNAAVVTEAPTGSNAAVVTEAPTGSNAARVMEVPTGSNAAVVTEVPTGSNAAVVTEAPTGSNAAVVKEAPTGSNAARVMEVPTGSNAAVVKEAPTGSNAARVMEVPTGSNAAVVKEVPTGSNAAVVKEVPTGVTLRWSRKRPRE

SEQ ID NO: 16088 - protein, 77 aa, Homo sapiens
  DOMAIN (41)..(75): AUXIN-INDUCED PROTEIN AUX28 domain identified by eMATRIX, accession number DM00770C, p-value=8.691e-09, raw score of 13.11
EGSNKFANDIQLLSIPYWKKRFLHMKKMPLFSKSHKNPAEIVKILKDNSAILEKQDKKTDKASEEVSKSLQAMKEIC

SEQ ID NO: 16089 - protein, 39 aa, Homo sapiens
LCEETPSIVKKCKISWEWWHIPVIPATREAEAGELLEPR

SEQ ID NO: 16090 - protein, 32 aa, Homo sapiens
VGIKMSISSDEVNFLVYRYLQESGFSHSAFTF

SEQ ID NO: 16091 - protein, 111 aa, Homo sapiens
FREDRLPADLRAKVWKIALNVAGKGDSLASWDGILDLPEQNTIHKDCPASLLDQLSVPEEKAAELLLDIESVITFYWKSRNIKYSTSLSWIHLLKPLVHLQLPRSDLYNCF

SEQ ID NO: 16092 - protein, 112 aa, Homo sapiens
KGLVSNGPERNTLCPCSTLLEEGSAAVEGSGAWGALRPVLVEPLDHGIREEVVRDWNSKQACTGTHQEACPVSLHKCCGPPQGTCHECSHCGQSGRIRPEKGPSRSSVRAPP

SEQ ID NO: 16093 - protein, 490 aa, Homo sapiens
  DOMAIN (14)..(26): GTP-binding elongation factors proteins domain identified by eMATRIX, accession number BL00301A, p-value=3.842e-13, raw score of 12.41
  DOMAIN (11)..(461): Elongation factor Tu family domain identified by PFam, accession name GTP_EFTU, E-value=5.9e-79, PFam score of 268.7
  misc_feature (1)...(490): Xaa = X or * as defined in Table 2
PLKAKMGKEKTHINIVVIGHVDSGKSTTTGHLIYKCGGIDKRTIEKFEKEAAEMGKGSFKYAWVLDKLKAERERGITIDISLWKFETSKYYVDXSLIAPGHQETFIQKHDLQGTSQGLAWFGGPPFWGGSPLIVAAGVGEFXSLVSPKNGADPTKHALLGLHTGVWKQTKLFGVNKNWISTXEPPYSPEEDIEGNCXGKVSTYIKKIGYNPDTSSILCPISGWNGDNMLEPSPNMPWFQGDGKVTRKDGNASGTTLLEALDCILPPTRPTDKPLGLPLQDVYKIGGIGTVPVGRVETGVLKPGMVVTFGPVNVTTEVKSVEMHHEALGEALPGDNVGFNVKNVSVKDVRRGNVAGDSKNDPPMEAAGFPAQVIILNHPGQISAGYAPVLDCHTAHIACKFAELKEKIDRRSGKKLEDGPKFLKSGDAAIVDMVPGKPMCVESFSDYPPLGCFAVRDMRQTVAVGVIKAVDKKAAGAGKVTKSAQKAQKAK

SEQ ID NO: 16094 - protein, 162 aa, Homo sapiens
  DOMAIN (45)..(162): Guanylate-binding protein domain identified by PFam, accession name GBP, E-value=4.9e-05, PFam score of -55.2
IRLDFQLLRTDRFSRIQAHEDKARGERTLHAAVPTPGYPESESIMMAPICLGENHEEQLTVNSKALEILDLISQPAVGVAIVGLYRTGKSYLMNRLAGKRNGFPLGSTVQTETKGIWMWGVPQLFKPNHTLGLLDTEGLGDVEKSNPKNDSWIFCLAVLLSS

SEQ ID NO: 16095 - protein, 50 aa, Homo sapiens
RILGGAKVYGGLQGIIFFLIGGRFKTYLGIFGKDLFFGGGTYWANFLPEF

SEQ ID NO: 16096 - protein, 33 aa, Homo sapiens
LRSRYGRAQHSTMLHHAPLQKILPPPVNTILMS

SEQ ID NO: 16097 - protein, 50 aa, Homo sapiens
RILGGAKVYGGWEGNIFFLLGGRIKTYLGILGKDPYFGGGTYWANLPTEF

SEQ ID NO: 16098 - protein, 59 aa, Homo sapiens
RTLGGAKFYGGLQGNSFFLIGSRIKTYLGILEKNLSLGGGTYWANLPPKFKGFRENINF

SEQ ID NO: 16099 - protein, 50 aa, Homo sapiens
RILGGAQVYPGLQGNSFFLIGGRIKTYLGIFGKNPYFWGGTYWANLPSEI

SEQ ID NO: 16100 - protein, 143 aa, Homo sapiens
GRARPGQNSYDLFLLAAAARGAGGHYAPPCTEDCRKSTYPPSGPTNRGAGPWYTINLDLPPYKRWHELMLDEAPMLKVIVNSLKNMINTFVPSGKVMQVVDEKLPGLLGNFPGPFEEEMKGIAAVTEIPLGKVHLEALKKKSN

SEQ ID NO: 16101 - protein, 29 aa, Homo sapiens
MRLRKQAEKNVEKKIDKYTEVLKTHGLLV

SEQ ID NO: 16102 - protein, 415 aa, Homo sapiens
LFLPLLEPGERRGLLYRSRPGGAVALILLAAAVSCAVSQHAPPWTEDCRKSTYPPSRPTYRGAVPWDTIQCLTYHPYKRWHELMLDKAPVLQKVIVNSLKNMINTFVPSGKIMQVVDEKLPGLLGNFPGPFEEEMKGIGRCLLDIPLGEIISFNIFYELFTICTSIVAEDKKGHLIHGRNMDFGVFLVWNINNDTWVITEQLKPLTVNLDFQRNNKTVFKASSFAGYVGMLTGFKPGLFSLTLNERFSINGGYLGILEWILGKKDAMWIGFLTRTVLENSTSYEEAKNLLTKTKILAPAYFILGGNQSGEGCVITRDRKESLDVYELDAKQGRWYVVQTNYDRWKHPFFLDDRRTPAKMCLNRTSQENISFETMYDVLSTKPVLNKLTVYTTLIDVTKGQFETYLRDCPDPCIGW
